United States Patent Application Publication US 2026/0191916 A1 - sequence listing, part 43

SEQ ID NO: 159 - DNA, 3996439 bp, Phocaeicola dorei (residues 1,998,221-3,996,439 of 3,996,439)
  source 1..3996439: mol_type = genomic DNA
gctgctggaccggtagaggcggaaagctatacgctggccgtgtccgataaagaggtacgcatcactgctgccgactttcaaggatttttcaatggcttgcagacgttgcggcagcttatcgtaaaggaaaagaaaggttacggaatagcctgttgcaccattaaagacacgccggcgttcagtgtgaggggggtgatgctggatgtggggcgaaacttcgcctcggtggacttcatcaagaaactggcccgccgcttgtctcattataaaataaacatgcttcatctgcaccttacggacgatccgggatggagggtggaggtaaagaaccaccccgaactgacagacaccgccaccttctggaagactaggcagcccggaaagttctatatgcagcaggaactggcggatttggtggaatactgcgccgggctggggatgcgtgtcctgcccgaagtggatatgccggggcatagtgcctccttcaggaagggggtgggagccgatatgcagtcggccaaaggaatggaagtgctgaaagaggcgctggatgaaatcattcccctttttcccgacccatggttccatgtcggttcggacgaagtgcagttcaagatggaagacttcatgccggaaatgattcgttacgtgcgcggcaagcacaaggaagtggtggtgtggtcgcccggatatgtgcctgatacggctgccgtgagaatgtgctggggcgaaaacgaggtggggcatgccttggacaagtcggcatgctacatagactgtaacggattctatctggactggatggactctcagacgggagttccgcaagtctttttccagcagccgtgtgaggtgccccgtggcgatgcccgggcgttgggaagtattttctgcgtctggacggatggggcgctcggttcggagcagcgtttgctggagcagtatccgttttatccctgcgtgcttacctttgccgaacgcatctggcggggaagccgcgaaaagaggcgtgactgcatggcgcgtatcccttccaagggaacggaggagtggaaagcttttgccgaattcgaacgcaggctggtctatcaccgggaccattattttgtcggcattcctttcgcctatgtggagcaggcggacatggagtggaggttgataggcccgtttgaccaccacgggcagaatgatttttcgttcgatcccgagcgtattataaaagaggcgtatgcggtgaatgacaccgtgttgagatggcagtcgcgggaagcttgcggaggtgcggtgcagatccgttcattgtatgatatgttcaatgcccaccgcaaagtctttcgtccggggcattggcctacgctgatgtctcctgcggtggggacagggccgggtacctgctatgcccttacctatattgaaagtccggttgaccaggaagtctggttgatgttcggtctaaacggcatgtgggggcattcgggtggctaccgttcgggcagggctccccagcagggcagctgggattatgaaggaggggatgtatggctcaatgacgagcgggtgaatcctcctcactggcctttccaaagcctgccgtggacaggatgggggagagggcgcattgaaattccgttgacgcaggaggggtatttctttcgtcctccagtaaagatacatttaaagaaaggtatgaataaaatgctggtacgtacggtctccggtccgtggaaaggtgacccgggagatcggaaatggcagttctgctgtatgcccgtgcaatgggacggactgcattacaccgaggtgaaggggttgaaataccacgcccggtaaggctgtcacattaagttatggaataatattcaaccaacctcattgataaacggtgtaatttatagaaaagatagtgaatatgcaaacgagaatacgaaaatattctattcgtggcacggctttttatttaaactttggatttggcgtacaatccttctgcccatgccagtgcggcatggatgtaataaaccaatagaaagttggacgtgaaaatgctctcattccctcacttttgttgtaactgatttataatgaacttcttattagtggtggtagcattatcattagtgagggcattgccctcactaatggatacttaaaaataaattattccaactttgatgcatagcacaaagtgcctttgttgctggcttttgaggaaatattcagtctatggagaatacattcaaactaattcatcttgttgattgatagcttttcacgtgtatattcttgcagctgattgaaaatcttcatgggcgatcattccttctgctttctattctgtagtagcagaataaaagtgacatttaaacaactgctcaaaaggcgaaatttgctcaaattcggtgttgtttcaccgcaatatctcctcttcacccctaaccgttcgttcttataaagcagttgcatggcttgtgcatcggattggcagtagtctatgtgcgcatattccactgtatctcagttgttttctcccttttctgttcttgctttttataggttgtaattgcttagttacctaagtgattaacggatattgaattttcaatcatcaaagaagaaaagtataacacaaactacggtggccgctatttatgctgcttatgtgaggaaagaaagctgaaaaacaggggatttcacaaataatcggtttataagtctgtgaatggatattatgttgtggatgaatgatttaagaggaaaatataggaaaaaggagtgaggacatactaaaaagtgagggcaatgctctcactttttagtatgtcctcactgtgtgtagtagatttataatgagtatattatagctaaaagtgatggcatgatggcataagtgggtgcaacttattattgtattgaaggataaaccgggtaactttggcgacagaataaaggtaacatgccgcactggcatgggtagggatattacgcccaatccaaagcttaaatgaaaaggctgtgtgttactgtgaattattcaggcgaagcctgtttcctgtttgcaggcgtatcatcaagctgtggaaataagagaggggttatcttaatattgcaagaatattaatcgggtactgccgtatatgacggaaatgatgggcatctaacctataaaactgctaaaggaaggaaaagtaatacatcagcgtgatggcgaatcagtagaagaatttacagatcgtcttttatgtacaaattagtatttgcggaagatgccaaaaagaatcactttgcaccctttcgggtatattatacgaaagaaaccaataaattatacccattagggtgtaattatcgctggttttgctatatttgtaccctaaagggtgtaattatgagtgattcattgtcattgtttgtaaaagaaatgcgtaagcggttcggacttacgcaagtagatttggcggctaaggcgggagtggggcttcgctttgtgcgcgagttggagcaaggaaagcagactttgcggatagacaaggtaaaccaggtgcttgccctcttcggacatgaagtaggggctgtgcccttaggaaaggagcatagcgcatgagaaggggaaaaatatacttgaatgatatctatgcagggttgttgacggaagatgagaatggtttcacctttgcctatgatgccggattcttgcgttccggcaaggcggaagccgtcagtctgacactgccactgacggacaaaccctatcacgacaccgtcttgttcccgttctttgacggcctgatacccgaaggatggttgctgaacattgccgaaaacagttggaagataaatcggcgcgaccgtatgtcgctgttgctggcctgttgcaaggattgcatcggggcagtaagtgtagtagaggatgaacccgataaaccggaaacatgatggaaaggtgtttgtattgttataaggaactgaaggaaggtcaggtggactatcatccggcttgtgcccggaaacttttcggtactcgtcaggcgcctcagttgccttacgtacggagtgaaataggcgaactggccaagcaggtagtgagggcacagactacgctgacaggtgtgcaggccaaattgtcgctcgatgtgaatcccggcggaaagaacgagccggaccgttttactattgtgggcttgtggggaaagtttattttaaagccccagactgatttttaccgggcattacctgaactggaggatttgaccatgcacatggcggaagcagccaaaatagcggtggttccccatgggctggtgcgttttgctgatggcgaattggggtacatcacccggcgcatagaccgtcgcccggatggtggaaagattgccatggaggacatgtgccagttgacggaacgtctcaccgaatacaaatataagggctcgtatgagcagatagccaagactatcaagaagtattctgcagtgccgcagcttgatctggtgaatttctgggaagtggtggtgttctcgtggattgtgggaaactcggatatgcacttgaagaacttttcattgtatgacacggggatgggctatagtctgacgcctgcatacgatttgctgtccacggttattgtcatgcccgaggatacggaggaattggcattgactcttaatgggaaaaaaaggaaaatatggagaagcgatttcgagaagtcgataatcgcatcgggggtcagtggcaaggtaatagagaacatcgcccggaaattccgacgttccatcattaaatggatggaactgatagatgtttccttcctgcccgaagacatgaagaaaccctataaaagactggtgctgcaacgtctgctttggctgcgctgaaagatctttccttttctgttttagttattttaattaaaacgtatgcagtctttaaacatctatttcgtttctttgttaaagaagacttagtatgaactaaaagattgtagatatgaaaattcgttatttatctttgatagtgttactggtaatgagcgtatttgctcctatacaggcacaaacctatgacaatttgtggaaagaactggaggtgttggaacgaaaggatctgccccaatcggtcatttccaaagcaatgaaaatctacgataaagcaaaagcggaacagaatgtaccgcaaatgatgaaagcctatctcactgccatgcagtaccgttcccttttaactcccgatagcttgaaggtagatatgaatggtttggaacaatgggcttcccaaaccggcagtgtggaagacaaagctatattgtattccattctgggtgaaatgaccatgtctgccgacgtaaaaaagggattgggctatttgcaggcctctctcaaggataaagaccggttattgcttgtcccggtcgagaaattgagatctatggtgagagtgggagaggctagtaaacggtattttcgtgataatctgtacaacttgttggcacgtcgtgccatacaaatcatgcagcagtacaggtggcaggcggctgctaaagcaaatcagacaaacagtctgcctgcggatatgacggatatggataagtttgttacttatcagtttgttcctgtctctgattgtgacttgacagcagctgtcatgcaggcttatcagtccttgctgaaagcatatgatacggaaacggagcgcgagggttggttgctgaccgctgtggatgcattgaattacctgtaccgcaatttttccggaaacttctcgaatgacgtatgccaacaggaactccggaagtggattcatacttatccggctgtgaaaacagtccctgaagcttatctggctttggcacaattcctacagtatcaaaataatcaggtagagcgcttgcggatagttcgtgaaggaatagccggatacccccgttacgaaggtatcaaccaactgaagaatatagaaaaggaaattctgaatgcaagcctttcactggaaatagctacggcttatcctggtgaacagcagtcggtgaaagtaaattataaaaaccttaccggcatcactttgcagttatataaggtgaatttacccgttacctctgccgtattgcagaacagaaccacccattttgaaagtaaatatgcctgtttgcaacgcgaggagcatttttctttgaaacctactacagattatttgaatatcgataccaccctgaccatacaggctcctcaagcgggaatttatttcttaaaggcagtgcccgatgggaagaagggcgtttcggacggaacattaatgaatgtcaccgctttaaagaccatttatcgtcctctgccggatggtacgttggaactggtggtggtagatgcagtgagcggacagcctgtttctgaggcggaagtaaccatttatacggagaagggaggaggctattctcctcaacagacctatcaggcggataaacagggtactttgaaactggatttcctgaatagtaacaaatactggtataatgcacatacggcggctgataatgcgatgcccatcttgaatctttggaaaaacgattattactataaagagagcaagaaaaaagaagttttgcaattatttaccgaccgatccatttaccgtcccggtcaaaccgtatatgtatccggcttggcttatgaaatggaaaaggattctacgcgtgtgcttgcggataaaaaatatacggtatccctatatgatgcgaataataatgaaacaggaaaagtagaagtatggacgaatggttttggttcgttcagcggacaatttgttttgccctctccttgcctgaccggttattttagcttgcgtgcggccgatacttctgtcagttttaaggtagaagaatataaacgtcccacctttgatgtcacgtttgaacccgtgaaagtggagtatcaagtgggtgactctatagaagtggcgggtatggcaaagacttttgccggtgcgcctgtgcagaatgccagggtacactataatatatcccgttcctatgcttggttctggcggtttatgggcagaggttcagcccgttgggagggagaggcaatgaccgatgcggatggtaagttcaccgttccggtgcattttgaaatagactcggacaggagagaatctccgttgtggtattatacgtacaacatacaggcggatgtgatggatggtgcaggtgggacacagcaagctaatttgtcattgcctttaggaagcacttcaatggtgctgaatatggataatctgcccgataattgggttaaagaaaagaagctggaaataaaactgacagccatgaatctttcgggtgagccggtagatactccggttacttatcaggtagtcgagatggagaagcagaaagacggtcaggaaaaagaaggcagaaaggtattgaccggtacggtggaagctaacaagagttttattcctgaggctatttatgccctgccttccggtaattatcgtttgaagctttcggctaaggatacacaaggcagagagtgtacggcatctaagaatttccttttgttctcattgaacgacaagcgtccgcctttcgtgataacggattggttctatcaggatggtctggaatttgatgcagcatctccagctactatatatataggtagcagcgaaaagaatgtctatctgctttatgatgtgtttgcaggcaataagcgcttggaaagcaaacgtatacagctttcggactcggtgatcagtttccgcttcccttataagaaggaatatggtgacggcattctggtaagtatggcatttgtgaaagacggcagactttacagtcataatgcacggattatgaaaccggcccctgagaagaagttgcagctgaaatggactacgttccgtgacaaactccgtccgggacagcaagaggaatggaaactgacggtactttatccggatggacgtccggctgaggctgaaatgctggctaccatgtatgatgcttctctggataaaatctatagtgcacataagctggactttggagtggactttcattatgtggttcctttgacttattggaatacatcctatatgcggaatgcttatttgtatgttgatttcccgttgaagaggttccgtgcggttcctttggaatatagtgaattgatcattccatctacaggaagaatggaggctgtggtggtaggttacggaggcagtcctcgtgccactcttacaggagctttgaagattagaggcaggagtgccgcaaatgctgtgatgaaccaggaggctgttactgatatggtgctccaggaagaaatggtagagacgtctgcacaggaaaaggcagaaatgggtagttctgaagaactggcagaaacaggtgatatacagatacgtgaaaactttgcggaaacggcattcttttatccacagctccgcaccaatgaaacaggtgaagtcagtatttcctttgtattgcccgagagccttacccgatggaagtttatgggcttggcacatacccagaatgtggattatggaaaaatagaagctaccgctactgccagcaaggagtttatgcttcaacctaatatgccccgttttgtccgcgtgggagataaagcgaatattgccgcttcactgatgaatctgtcggacaagggggtgaaagggactgtccgcatggaattgtttaatccggaaacagaaaaggtattctattcacaaaaacagaagttcgatatgaagggaggagaaaccgggcatgtgaactttgcttttgaagtgagtgacaaatatgcggtaatggcatgccggatggtagcggatggagataccttcagtgatggagaacagcgttacattcccgttctgacagacaaacagtgggtgacggaaaccgttcctctgaacgtgaatggggaaggtgtgcatactttctctttggaaaatctgtttaacaagcatagcaaaacggcttccgaacaacggttgaccgtagaatttactgcccatccggcttggtatgccgtgcaggctttgcctgtagtggctaatcctcagaatgaagatgctctttcctgggctaccgcttattatgcccattcattggctgcatgtatagtcaaagaaaatccccgtatcaagcaggtctttgatagctggaaggctcaaggtggtacaaaggagacttttatgagcaatctgcaaaagaatcaggaactgaaaaatatcctgctggctgaaactccctggctgacagaagctaccaatgaagccgaacaaaaacagcgtatcgccactttgtttgacctgaatacaatgaacagcggactggcagtttctgtagagaaactgagagaattgcaaaatggagatggcgcatggagttggtataaaggtatgcaaggcagccgctatgtaaccactcaggtaatggaaatgcttgtccggctgaatgcattgactcctcaggatgctgacagccggatgcagcctatgattcaaaaagggttcgagtatttaggcaagcaggctgccgaagagtataagtctatgaaagaagctgaaaagaaaggggctgtcggtatccgtccgttagaacaggttctcaggtatttgtatatctgcgctttggatggcaaggctccggttgatgaaaaggtgaaccggtatttcatagacaagttgtccggtgaggaaaaagaactgacgatttatggaaaggcgttgggagctatcatcttgcagcaagccggtaaggtggcagaggccaagttgtttatgcagtcattgatggagtattctgttgtgacggatgaaatggggcgttactttgatactcctaaagcccgatattcatggttcagttataaaattccgactgaagtggctgctatggaagctatacagcgtataacaaaagatacgaaagctattgatgaaatgaaacgctggctgttgaagcagaaacagacacagacttgggaaacgccgatagctacggctgatgcggtgtatgtattgatggctacaggaacttcggatttattggcaaatacaggaggagtagagattactttaggtaaagaagtgatccggacttcggcagatgatgccatcggttatatcaagaagacgatgtccggtgatgtgatgaatatcaagaaaataagggtggataaagaaggagccggaatgggttggggagccgtttatgcccaatatctggaaagtatggatcaaattagcgggcagggaaacggattgtctgtcagccgtcaattatataaaggggatgaggctttgaatgaatcagctccgttaaaggttggcgataagattaccgttcgcctgactgtaaaggctgaccgtgatatggattttgttcagatcaaggatgaccgtgcagcttgtatggaaccgttacaggcagtttcgggatttcgttggagcaacgggctgggatattatcaggctaccaaagatgcttcgacccagttctttatcgatcagatgagaaaaggaacttatgtgatagagtatcaggtgtatgtgaaccggacaggagaatatcaggctggaattgcaactgttcagtctgcttatgctccggaattcggagggcatacgggaggatatcgggtgatggtggaatagagaaacaggatgtctggaattagttgtgtgatttcataaaaagtaagttagcttgctaacttactttttttcttatgcttctgccgtccacccattctaatcttatttcaaaaccatcttcagccgtgccataaaaatagcggcctgaaacggatggatattcaattataaatgtataaccatctgaataatatagatataaccaaccgttttgaatttcccagtcaaacttatataccctataaagttcatcatcatagtaacagcgttcttccgtacctacaccatgatccgagaaagcacctgaggtgaatgtaatataactgtaaagccgttctccgtatgggtcctcaaatcccatttcgccccaccaagtcttaccgtataatcctgaaatatcaaatcctctttcttcatcgctttcacatgaagaaaaacttatcattgtaatcaatgcaatggcaatgaaccagtaatgttttactattttcataatttatctgatttttaatgcgggacaaagataaaggttattcataagataaaataaattataggctgaaaaaatgggtaaaggatgttttttgtctatctttgctatctaaaaagcataaaataattgtatgaaacatattatactgatagtaagtttgttaatgggagtgactttgggagtacaggcacaacccaaagcattatttgataagacaacgcatgaatttggaactattttatggaaaaatccggtgacggctacctttaaaatcactaataaaggagataaacctttagtgatatctaatgtgacaacttcttgtggctgcacggttgctgattggaccaaagaaccgattgccccgggaaagaccgggattgtcagttctacttttgacgccaaagccatcggacgttttcagaagagcgtaggcatttattgcaatgcctccaataaacctatctatctggctattcggggagaagtgactgccgatcctaaaaactatactttcactcatccttttcagattggagctatccgtttgaataaggaggaaatagaatttgaagatgctaataaaggggataaaccaactatggaactgttggttgccaatacgtcagataggttatacacccctgtgttgatgcatttgcctccttacctcagtgctgttgccattccggaaaaactgggaagaggacgtacaggtaaaatcaagataactcttgatacggaaaagttacctaaactgggtttgacaacggcgtctgtttatctttcccgtttcctgggagataaggtgggagaagaaaatgaaattccggtttctgccgtattgttgccggatttctcacatatcagtcagcaggaacgcttgaatccgcctgccattcatctttctgccgaagagttgcagatgggagaactggaaagtgatgaaaagaaagcacatacgattattattaaaaatgtaggaaaatctaatctggaaattcgtgatttgcaggtgttcaattctgctttgggggtccagttgaagaaacgtgtcttgaaaccgggtgcgtctaccaagttgaagattactgctttcggtcaaaatttgaagaaagtaaagggtactccgcgtgtcctgatgataaccaatgatcctaacaatccgaagataattattaaagtaaaagtaacctcaaaaaaatagctatggaacatcctgaaaatagtgaagaatataagggattgacagtgaacaaaggtattgagcaaccatctattgtgaatccttatttgaaactacgtaaaaaacctcgtcgtcgtgagttttccgtaggtgaatatgtagaaggcatcgtaaaaggtgatgtgaccgtattgagtcaggcggttactttagtggagagtgtaaaaccggaacatcaggctattgcccaggaagtgatagagaagtgtctgccttattccggaaattctatgcgaatcggtatcagtggtgtgcccggtgccggcaagagtacatctattgatgtatttggattgcatgtgcttgagaagggaggaaaattagctgttttagctattgatcccagtagtgagcgttctaaaggcagtattttgggagataagacccgcatggagaaactatctgtccatccgaagtcttttatacggcctagtccgtcagcaggttcgttgggaggagtagctcgtaagactcgtgaaacgatcatactttgtgaggcggcgggctttgataagatttttgttgaaacggttggagtagggcagagcgaaacagcagtgcattctatggtggatttctttttgctgatccaactggccggtactggtgatgaattgcaggggattaagagaggtatcatggaaatggcggatggaatcgttatcaataaagctgacggcagcaatattgagaaagcaaaactggctgccagtcatttccgtaatgctttacatttgtttcctgctcctgattcgggctggagtcctaaagtaatgacgtattccggcttttatggtattggaattaaagaaatctgggatatgatctatgaatacttcgcttttgtgaaagcgaatgggtattttgaatatcgcagaaatgaacaggctaagtattggatgtatgagtctatcaacgagcatttgcgtgatagtttctataataatgaaaagataatttctatgttggctgcaaaagaggaagaggtgctgaatggcaaactgacttcgtttgttgctgccaaaaagttattggatgcttatttctcaaccttgaaataaggttttcctactactacaggtaacataaaaaacgcagatttaatgaataattataatctgcgttttttgtgtacctgtggtggataaaaattagatagaaagttcatgaagtacgttcaccaattctctgtctataggcttgtcgttctttatagctttagcgaaaggtacataaacaatcttatcatcatcaataccaatcattacattacgttgtccttccaatagtgcttggatgctagccactcccatacggctggcaataattcggtcatgcgctgtggggcgtccgccacgttgcaaatgtcctaatatcgttacacgcacatcgtattgcggatattcgttcttcacacgttcggcatagtgcattgcacccccggtcagttcgctttcggctactaatacgatactactgctcttggatttgcggaaaccatgttcgatgaattcttccaattggtcaacttctgtgctgaattccggaataatagctgcttctgcacctgcggcaatagcaccgttcaatgccaagaagcctgcatcacgtcccattacttcaacaaaaaataaacgttcgtgagaagttgccgtatcacggattttatctactgcatctaaaattgtgttcaaagctgtatcatagccgatggtggtgtcggttccatacaggtcgttgtcaatcgttccgggcagaccgatacaaggaacatcaaattcttgtgcgaaaatacgtgcaccagtcaaagaaccatcaccacctataatgactaaagcgtcgatttcatgcttcttcatgttttcgtaagcttgtgcccgtccttcgggtgtcgtgaattctttgcaacgggcggtcttcagaatggtacctcccatttgtatgatgttactaacattttggcttttgaattcctgaatttcatctgttaccaatcctttgtatcctctataaatgccatatactttcaagccgttatagatggcagaacgtgtgactgcacgaatggcagcgttcattcccggagcatctcctccagaggttaaaataccaatgcttttaatcgttcccataaatacccattttaatatttttatgtcgcaaagttaacaaattatcagttggacaacgataattttctattttttattggtctatttttcatttaagattgcttttttacattcttccatcaaccatttgggggtggaagttgctccacaaatgccgatggaacggacgttctcgagcaagttccggtctatttcttccggctggtcaatgaggtatgaattcggattaatctttttgcattcttgatataagatctttccgtttgaactttttcgtccgcagacaaaaaagatcagatcatgcgctgctgcaaatttgcggatgttaggcatccggttggccacttgccggcagattgtgtcgtaaaattcaaaagtggcatcgggtgaaatgtgttccttgatatattctatgatttgccagaattcttccagagatttggttgtctgggagtacaagcgtatgtctttagtgaagtctaaatgagcagcttcagcaggtgtttctatgacaattgcttttccatgagtttggcctaccagccccagtacttcggcatgaccgtttttgccataaatcacgatttgtgtgtcttgacttgccggaacattatcatactcctgtttgatgcgcttttgaagacgtaatactactggacaggtggcgtcaatgatctcgatgttgttggtacgagctatagcgtatgtttcaggaggttctccatgtgcacgtaacagtactttggcatcgtgtaattgggcaaactcttcgtggttgattgtgataagccccattttttttagtcgttcacattcctgtccgttgtgtacaatgtctcccaggcaataaagagtgtttccttttgccagttcttcttctgctttacggatggccgtagtgactccaaagcagaacccagatccttcgtctatctctatgttaaccatttatagctgcttgaaatttttcggtcagccactctttctgttcggcaatgctcatgtggctgttgtctaataagatagcgtcatccgcttgtcgtaacggaccgacttcacgggtttggtctatacggtcacgttcttccacattttccaggattttttcataagaggcctcttgccctttactcctcaattcatcataacggcgctgtgcacgtatggcagccgaggcggttacaaatattttcagttcggcatcggggaaaacaacggttccaatgtcccttccgtccatgacaattcctttggcctttcccatttcctgttgttgttttaccaaagcctcacgtacaaagcccaaggcggcgatagggcttacatgagaagaaacctccatgctgcggatggcatcctctacatttgtatcgttcagaaaagtcatgggacgttgtgtttccggattcaaccggaatgaaatatgtatatcgggcattgctgtttttaacgcttcggtgtcgatacctttttccgaaaagaaccctttctgtagactatataatgtaacagcacgatacatggcaccgctatcaatatagatatatcctatttcacgtgccaagtctttggccatagtgctttttccacatgatgaataaccgtcaatggcaatagttattttcttcatatataattaatgtataggtgactattaaaaacgcttcaaagatagataaaagttgggtgtatgtctatgaaatcggatgaaaataaaatgaattagcatattttttatgtgaaaatactttttatttaaaagatttgtgttacatttgccctcagtgagaaacacttaatttttaaaacacaatttatggaagttaaaaaatcgcctaaagcagatctcgaaggtaaaaagagtacctggctgcttatcggttatgtgtttatccttgctctcatgtttgtagctttcgaatggactgatcgcgacaagcaagtgactacggatacaggtataactgatgtcgtatttgaagaagaaattatccctattacggaacaggaacaaaaacaagctcctcctcctcccgaagctcctaaagtagaagaagtgcttcagatcgttgagaacgatgctaaagtagaagaaacgactattcaggcttcagaagaaaccggtcaggcagtagaagttaaatacgttccggttgaagttgaagaagaagaacccgaagaacaacaaattttccaagtagtagaagaaatgcctgaattccctgggggtatggctgaatgtttgaaattcttaggtaagaatattaaatatcccactatttctcaggaaaatggtgtacaaggtaaggttatcgttcagtttgtcgttaataaggacggttctatcgttgacccggtggttgtacgtagtgtagacccctacttggataaggaagctctccgcgtaatcaagaccatgccgaaatggaaacctggaaaacaacgtggtaaggctgtacgtgtgaaatatacagtgcctgtaactttcaaattacagtaataaaaatacttcaatatcttaattgagaggctgctttgaggcagcctctttttctaataatcccttaattaaaacaatcttatggctttttctgcagaacaattattagataaggtaaatacctaccttgctacaatgccctatatgcgtgacccgaaagggttatatgctcctatagaatatgtcctttcattaggtggcaaacgtatacgtcctgtcttgatgttgctgtcttatcagctttataaagaaaatgtggatgatattttatcacaggcggcaggtatagaaacttatcataattatacattgttgcatgatgatttgatggatcgtgcggatatgcgcagaaataagcctacagtgcataaggtttgggatgaaaatacggctattctttcaggagacgccatgttggtattggcttatcggctgatgaataattgtccggatagctatttaaagcaagtaatggatattttcagtcagacagctttggaaatttgtgaggggcagcagtgggatatggaatttgagacacgtagtgatgttaccgtatctgaatatattgagatgattcgtttgaagacatcggtacttttgtctgccgctttaaaaattggtgcggtgttaggggatgcttcggaagaggatgcacaaaaattatacgatttcggtattaaaatgggattagcatttcaattacaggatgattttctggatgtatatgggaatccgaaagtatttggaaagaatattggaggggatatcttgtgtaataaaaaaacgtttatgctgattaatgccttaactttggccgacggacatcaacggaaagaattggaaaaatggatttcatctactgatttctatccggaggaaaagataaaggctgtgacagaactttatgataagattggcatcggcaggatttgtgaagagaaaattaatgcttattatgctgaaggactttctttattggaaagtatagctatgccttccgggaaaaaagaagagttgaaatcttttgtttgtcatttaatgaataggaaagtgtgatatgattgatacacattctcatttgtttgccgaagaatttacggaagatttgccggcggtgatagaacgtgccaaggctgctggagtttctaaagttctcatgcctaatattgatgatactactatagaggcgatgctgagtgtttgcacggcatatcagggatattgttttccaatgatcggatttcatcctacttctgttgatgcagattcattgttccgtattcatgaaatgaaaaaaatattctccgatgggcatccttttattgctataggggaggtggggatggatttgtattgggataaaacctatttgaaagaacagcagaaagcattggatatacaggttcagtgggcattagaatatcatttgcctttggtgctgcattgtcgtgaagcttttcctgagttgtttgaagtgatggagccttacaaaacgactgagttaagtggggtcttccatagttttacgggaactttagaagaggctgagaaggtgttggagtattcgcgttttgtctttggaataaatggagttgttacattcaagaagagtagtttgcccgaaattttgacgcatctgcctttggatagaattgtccttgaaacagactctccttatttggctccagtgccttttaggggaagacggaacgagtcttcttatataaagaatgtagctatgaaacttgctgaaatctatgctgtggattttgaatacatagacagaatcacgaccaataatgctttaaaagtgttcaaaatggctgaataagtttttaaagtttattaattttgatgagtaattccaataatgacagggttaattctacgtaagacgaaaaaaaagaatacatttgtagctgaaatcgcttgcaattcccgattttctttgtaatttgcacccgattttaaaaaagatagtattgtgtagcccgaaataaggagagatgctcgagtggttgaagaggcacgcctggaaagcgtgtaaacgccaaaagtgtttcgcgggttcgaatcccgctctctccgctgttgttatggaaaacgtaaaagcaggaaaacaattaaaacaaataaataacaattaattaattaatcttaaaaaattagacacacaatgaaaaagttatttgcaattcttgcagtgatgggagtccttactttaggatcagttcagcctattatggctcaagacgcagctccggctcaaacagaacagactactgaagcagcagtggttgaagaaggtggtggtcttcacaaagagttaaaaactaagttcatcgaaggtgatgctggttttatgtctctggtagcaatagcactagttttaggtttggctttctgcattgaacgtattatttatttgagcttggcagaagttaatacaaagaagttgatgactagcatcgaggctgctttggaaaaaggtgatgtagaagctgcaaaaaccgtatgtcgtaatactcgcggtcctgttgcttctatttgttatcagggtttaatgagaattgacgatggtgttgatgttgttgaacgttctgttgtttcttacggtggtgttcaggctggttatcttgaaaaaggatgttcttggattacattgtttattgccatggctccgtctttgggattcttgggtactgtaatcggtatggttatggcgttcgataaaatccagcaggcaggtgatatttctccgacagttgtagcaggtggtatgaaagtggctttgattactactatctttggtttggttgtagcattgattctgcaggtattctataactacatcctttctaaaattgaagctttgacaagcgctatggaagattcttctattactttgcttgacatgatcatgaagtacaacttgaaatacaaaaaataattaggacaatggctaaattatcatataaaatgtcctactatgctttatatgtctgctttgccgttattttggtagtattgggcatgttcttcttggtaggatataataatccggtgggagatatgaatgctcccgaacacactgaaacattgatatacttaatgtatgcattgtttggtgtaactgttggcttgacggttattgcagcaattgcacagtttggcgcagctttaaaagataatccgatgggagctataaaatctttacttggtctcgttttgttggttgctgtagtattaatatcttatgctatgggatctgatgcaacgattacagctaatgaagctccttatacggatactttctggttgaagataacagatatgtttatctattcaatttatttcttactgggtattgctgctttagcaactttggtaaatatgacaggtatctttaagaaataatattatctcattgatatttaacaattaaaaaacaaagtaagtaaaatggcaagaaagaaaagagccgtacctggaattaactccagttcaacagctgatattgcctttatgttgcttattttcttcctgattacaacatcaatggatactgaccgtggtttggcgagacgtcttccgcctcctcccgaaaacaaggatcagaaacaagatgatattattgtaaaggaacgtaatgtactccaggttcgtttgaacaaagatgaccaactgatgtgtggtcaggactacattgacattaagcaattaaaagaaaaggcaaaagaatttatagtcaatccgtatgatgatgaaaaattgcctgaaaagcatagaaagaatattcctttgctgggtgattgtatgattacggaaaagcatgtaatctctgttcagaatgacgttggtactagctataaagcatatattgacgtacagaatgaattggttgctgcttataatgagttacgagacgagctaggaaaggctaaattcggcaagacttacgctcaatgtgatgaagatgagcaaaaagcaattcgtgaatattatccgcagaagatttctgaagctgaacctaaaaagtatggaggtaagtaatgggaaaatttaataaaacaggtaaacgtggaatgcctgagttgaatacctcttcattgcctgaccttatctttaccatgttgttcttctttatgattgtgacaaccatgcgtgaggttacattgaaggttcaatttcaggttcctcaaggaacagagttggaaaaattggaaaagaagtctttggtttcctttatctatataggtaagccgttgccggagttccaaaagaaaatgggtgctgaaagccgtattcagttgaacgataagtttgctgaagtatctgaagttcaggactacattactcaagagcgtttgaatatgaaagaagaagaccagccgtttatgaccgtttctttgaaagttgataaggacacaagaatgggtatcgtaaccgatgttaaacaggcacttcgtcaggcttacgctttgaaaattaactattcagctactcaacgtcagtaatagttatataagcatagataaaaaaggaagctgtttgtaacagcttccttttttatgtcttctattctatttatttgttatgaacggatttaatctgctacctatggtatagtaatagtatgtacaatggaccttttgaggataaactcctgcgcgagtcagcattatagtaattgaagaaagatgaagaatgaatgttcagatttcttgtccgtaaacttctttataaagagtctttttaactttctcaaaatcactttccatatctatatccccataggtcattaagagcattggtagaccgttatctcccttacggtagggaggttgcatatagggctttttatgcaaagtgaattccaaacgtttatagaagtgaatacggcgtgtgctcatttcatcattaggctcctctacttccaatacaattggaccttttaattgtttttttatcatttccagtacacgttttccataaccgccgtttctgagactgggatcaatagcaaaatgttcgatatagtaaaaatctcccattgtccaataactgatcataccaatgctgttaccgttttctaaaataatgttgttacagaaccggagattattatcagaatattctctctgttgtacagtatcacgacgttcttcttgagggaatgccgtatgcattaatttttctacaaaggtatagtttacctcatcttgtgtttttacttgtttaatttcaatcattttatctgtctttgtttagtcttaagtataaacctattttgcggtataaaagtttattagtctttctaatgcacgttgacataccgggcagaatgcaggtgcttcgtttatcttcattctgcattcggtagtagggcgataaagtcctttttgcgtatagcctgctccttcatagactcctactttggtgtataagtcggcattttctgtagctaccggagtaggtatggcagtacctttcggaatcatatctttccatttactgtcgaaatcaattaatgtggtgatattcggttcccaaggttccacttcatatggatattgcgggcttggagcttcggtatatgcatattcatctgctaatcctccaaaactatggccgaattcatgaactacaactggttgaaaatccggatggtgagctgtggtcagtgtatatgagttatagatgccacctcctccataggtgtctgtattggctagaataatgatatgctcgtaaggaattccagccaaccaattatgaatactttttacccgactggtagtgagataccggtcagaatagaaagtgttgaaatgtgaacttacagccgtagatttccatttgccttgtcccggtatgctgactccgctgtcttccgaagggcttgctacagcaacaatattaaatttctccttcagtttcttgaaaggttcatgactgaacagggcgtcacatgccgtctgggcatctttataaaatatatccatctctttttctgtatatccttctgccatgattgctacatcgatacaatctgcggtatttccgctttgcagaagatagcgatggggggtaatatggtttgttccccgttgatggattaaaatatcattggggactatttcatgtgtgagtgaggcatttactttatgatatacatcttttaaagatatggtcactattgcttcctttttgggataaggcaaaagaaaagaattctcgaatcctttttttatcctatttgcttcttcttcgcttacccattcttggaaaaggcttgagaatgatgttcgataaatagtttttcctgttgccttatctttcatcgtgatttcaccgttgccagccaagggaagctctgctagatgatgcttgcgtccagcccatttcggaagacttgacagttcgtccaaatatatttcttgtttagtggcattaccagtaaaaatataatctactcgaagcgttttgtcttcgaaatagtcattaaaattttgtgcgtttacagttacgctgaataaactccataaaataaaaataaatgtctttttcatcgtttgcgcattttctacaaagatagaatattctattaaattattggtatttatacaataaaagttatgaatcgcacgaatattgtcgagaaaagtcatatctttgcagaaaattaaactaaaaagaatgggacatcatcaattagacagtttggatgagcagatcttaaggttgatagccagcaatgctcgtattccgtttctggaagtagcccgtgcttgcaatgtatccggtgctgccattcatcagcgtattcagaagctaaccaatttggggattcttaaaggatctgaatatgtcattgatccagaaaagatcggatatgaaacatgtgcatatattggtctttatctgaaagatccggaacaatttgattcagtgacagaggctttaaaaggtattcctgaagtcgtagaatgtcatttcactacgggacaatatgatatgtttatcaagatttatgcaaagaacaatcatcatttgcttagcataatccatgataagttacaaccattgggcttggctcgttcagaaactattatatcatttaatgaggctattaagagacaaatgcctattctcgatttagctgatgaagattaattgttactttatgcggctataattaataaaactatacgggtagagatgtttttcatctgtcgggtgatcttctctacctgtttctttccattcctctttctttatttcgggaaaataagcatcagcttccttggatgtgtcatcaataaatgtgatatataattgtctggctatatgcattgcctctttatacaagctggcaccgcctataataaatatttcttcttcctctttgcagtgggataaagcgatctctaatgaggggaaacattcagccccggcgaaggctgctccttcccggcggcttaatacaatattccgacgattgggaagtgctccttttggaagtgattcaaaggttttgcgccccatgataatagtatgtccggttgttaaggctttaaaacgtttcaaatcgttgggaagccagtataataatttattttcaaatccaatgccgtggttgcgtgctattgctactataattgaaatattcatagtgatgagtgattagtggtgaatgtttagtgatattagtggtaagtgatgaataaccttgcgtagcttattcaccataactactaaacagatactttacctgcaatgtgtggccatggatcataattcaccaattcaaaatcttcatatttaaaactgaatatatcctttatgtccggattgattttcatttgaggtaggggacgaggttcacggctcaattgaagttttacttgttccaagtggttggtatagatatgtgtgtcacctagtgtatgaacaaaatcaccggtttgtaatccggtaacttgtgctaccatttgcagcaacaatgcgtaggaggcgatattaaaaggtactcctaggaatgtatctgcgctgcgttggtaaagttgtaggcttaaacgtccgttggcaacgtagaattgaaaaaaagcatggcaaggaggaagattcatattgtttaaatcggctacattccatgcgctgacaatgatgcgtcgtgaatccggattatgtttgatggtttctattgcttcggaaatctggtcaataaagcctccattgtaatctggccaggaacgccattggtaaccgtagatatgtcccaaatcgccgtttgcatcggcccattcattccagatgcgtactccgttgtcttgcaggtattttatattggtgtcaccttgcaaaaaccataaaagttcgtggatgatagattttaaatgtagttttttagttgtgaccaaggggaagccttcttccaaattgaagcgcatttgatgaccaaatatactaatggttcctgttccggtacggtcctctttgtgaacgccttcggttaagatacggtttaacagatctaaatattgtttcatgctcggaaaatcattttatggattgcaaaagtacataaaatctttctttttccgagcatgagaatgagtctatttcgttttttaccattttaaactgcatacacgttgtacaccgatgatgataagaaccactgtggcgatgatcagtgattggaaattagtatcactcatcaaataataagtttgggaagcgactatgtcactgattgtctggcatagaatttcaaagccattgaaaatatagaataatgcacagcagataatggcgcaagttacactgagtatatccgataaccacttggcctgttgggggaggcggcggataacccggcgtgaaaatccattgtcctcaatttcatgtttgtaggcaagcatgaaattcttaattaatttatcatcgttttccatcataaccattctgttttaagaaagttgtcaattttgtttttccgcgtgataaatgggacttgattgttcctgcaggcattcctgtaatcactgcgattttttctatcggaagatcttccataaaaaataaggtgatgcaggttcgctccacctcttttaattggctcaatccccgatatatgtccatgtgttcacctacttgcctttgttctgtttggtaaacagcatctatttcccaagtttccagtccggacgtttcttttttgctgcgaatatagtcataaaatatattataagcaatacggtaaagccatgtggaaaaactggacaaatttttaaatgaagccaagttggtgtatgcttttataaaagtttcctgtgccaagtcatcgctgagttctgtatctcctaatgtttggtgcaggaaaaaacgcctgatgggcgattggtactttttgaccaaagtatcaaacgcccgggtgtttttaaagaccaccacttgtgctaccaacgctatgtcgttgatttggctcatttttattcttcgttgtggggagtatctatattgttctttatgttttgtgtttctttggcctcttcgttacgttccagttcaatattttcaattttcattgatttggctccgttttcatcctggtttattcgggtaggagggaaaggatcatcttttttctttttgtgtggagtggtagtataagctatcaatacttgtcccaaccccatacagaaaataaggaatccgattgctgccaatccttcttcttctgtcaacacccaaaggaatactcccagaccaatgcctaagaatatattcttgatcccctttgtcattacagcatttccttgttcttcggggtcattgaacagttcggtcggaatggttcgtcctgctgccagagcctctgcagccagtttgtatttggcttgtttgttcttgtacctgaaccaaagtacaatagctacaataaagaaagggagtccacaacagatgatgagtgcgacaattgctaccgaagtaggaggaccgctattccagtcaccgaaatccgaactaatgttatgcatggtagcattctgatcctcatctacatcttgcaggtcgcttataacgactgtatccatccgggtgctgtcaagggcggaaggtactaatttgattgttttggcatgggttgcgaagcaagtccctatgagtaaggccaaaataaaaagtaactgtttcatgtttttatatctttattattgttttctgctagttagacggaacgaattaggaaataggttgcaaatagacagaaaattttcagataatcccaaaatatcatcgtatttttgtagtataaaaaggaagaaatatgaaattaccatcagaatttgaagcaagaaccctggaatggatgggggaagaaacttatcgtgcgttggaagctgctttacagacagagcctcctgtcagtatccgtgtcaatcgtacgaagtggagtggggaagttacaggagaaccggtactttgggcatccgcaggggtctatttatcgcaacgaccgacttttacattcgatccgttgtttcatgctggttgctattatgtgcaagaagcgtcttccatgtttgtggaacaggtattacgcacttatattaccgggcctgtggtgatgctcgatttatgtgctgctcccggtggcaagtctactcatgtgcgttcagttcttcccgtaggtagtttgttggtggctaatgaggtgatgcgtaaccgttctcaggtattggctgaaaatttgataaagtggggaaatgtagaagttgtggtgacgaacaacgatccggccgatttcacttctttgacagaggtgtttgatgttgtcttggcggatgtgccttgttccggtgaggggatgttccgtaaagatcctgtggctgtagaggaatggagtacggacaatgtgcaggtttgttggcaacgtcagcgtaggattttagcggatatatggccggctttgaaacccggtggcctgctgatttatagtacctgcacttataatagggaagaagatgagaaaaatgtggcttggattgctgatgaattgggggcggagatactgaaagtgccagtggtatcggaatgggggataatcggaaatttggcgggacagaattttcctgtttatcgttttttgcctcatagagtaaaaggagaaggatttttcttggctgtattgaggaagagtgccgccatttctcatgctgttccttgcatttgctgtcgggatgacaaggagaaaataacgaaaaagaagaggaaaggagaaaaagggaatttgtctcaggttgctccttttcccaaagaagtaaaaagttggttaaagcaggcagaggatttccggtttgaggtaagaggtacgaaggtgatagcattccccaatgttcatctttcggaatatgacctgttccgacaggaattaaaagttgttcatgcgggcgttactataggcgagttgaaaggaaaaaacgtgataccggatcattcgttggcaatgagcacacagctgaatcatgatggtttctcttgttttgaattgacctatgaacaagctattgcttatttgcgtaaagaagcgatcacattggatgcttctgttccgcgtggctatatacttttaacttataaaaatattccattgggatttgccaagaacattggtaatcgggctaataacctctatccgcaggagtggcgtatccgaagcggttatttgcccgaagaactttcttttgtatgctaaaaggagccataaatttgttcgggaagattgtgcatattgcttttcatagactgacgcaatgcttctccgggtacagacttgcttgaattctataatatacaaattttgttggccttgtacaaaggaaagtgtggttgtcagaacgacttcctgtaggtacacccgtttttccattctgaacagccatacgcggtttttccttttataatcgttcctttgccacatagcgggcaggtttttcccgccaattcgttatcggatgggatagcgggagcggacgtggctgaagaagtgttttttcgtggggtgccggtcttttttttaggctgtttggccgtagagggtgttgcagcttttgtcgctgtttcctctattgcggtgacacggcggtttgtattatcacttaaaacgctgtgtactatttcactcaccatctgctttaattcatttagaaaagtcgttgcatcatagcttttcttttctatttcacgtagtttcttttcccatatacccgttaattcggcagatttcaacagttcttcgcggattagtcccaccagttctattccggtaggggttgcaatcaaatttttgcgttctttacggatataatggcgtttgaacagggtttcaataatggctgcgcgtgtagacggacgtcctattccattttcttttaatgcatcgcgtagctcgtcattatctaccagcttaccggcagtttccatagcgcgcagtaaagttgcttctgtatatggccgtgggggctgtgtccacttctcgtctagtttgggcagatgtggcccgctttctcctttcacaaaagcgggtaaggagtgttcttcgtcactttcacgggcttctgcgtcaggatcggtcataccttcaggcagattggtttgtggtttggcaaagataacgcgccatccgggatctagaatctgttttcctgtggctttgaactctatactgtcagcttcgcctattacggtagtagtggcaaacttacagtcgggatagaatacggcaataaagcggcgcgctaccagatcaaatacccgtttctccatttctgtcagatttacaggaggttgtcccgtaggaataatggcatggtgatccgttacttttgaattgtcaaatacttttttggacttgatgagcttttgtcctgccaacggagcggtaaatgctgtgtatggagttagtcccgccaatatattgggacatttgggatagatatcatcgcttaagaaagtagtatctacacgagggtaagtagtcactttcttttcatacaatgactggataagttttagagtttcatcggctgaataagcaaattttttattacattccacctgcagggaagtcagatcgaaaagacgggggggggcttctgttccttgtttttttgctacttctgtcacagtaaaaggaacatttttgacacgctccatgagtgcctgtccggtagcaagatcaatgatgggaggaattcccctgttctcttcagcctttttggctttcttgggattctctttggcgtcgctttcttcctgagctaattcctcatcgcttttgcggatgatggcagagaatgtggtttcccggtataaagtagccagcacccaatattgttgcggagtgaagttttctatttcttgctgacgctttactatcagtgccagagtcggagtctgcacccgtcctatagatagtatttgtctgttttgtccgtatttcaaggtatagagccgggtggcgttcatacccaatacccaatcgccgatagcacggcttaatccggcttcgtataaaggttggaattctttttggtcttttagtttgttgaatccttcgcgtatggcttcttcagtcaaggatgaaatccatagacgtttcaccgggcagtgtgctcctgctttctgcatgacccatcgttgaataagttctccttcttggccggcatcaccgcaatttataatttcatcggcattttgcatcagtccttctataatgcgaaattgtttttcaatgcccggatcgctgatcagcttaatgccgaaacgaggtgggatcatgggaaggctggacaggctccatgctttccatgagggagtgtattcatgaggctccttcaaagtacagaggtgtccgaatgtccaggtaacctgatatccgtttccttctatatatccgtcttttttgttttttgctcccagtacatccgctatgtcacgggctacggaaggtttttcggcaatacaaactatcatatttttttcgtttctgttcaaataggattgcaaaggtaataaaaacctcggaagagattttgttttgtctttattagttcttcttttataagaatttaaaagtagatatcgggggcttcaaggtcatttcagtgcaagtgggctattaggtatggcttttctgttatttgctgtttgacgaatgtcttttgaacttttctttatgatttcagtttcttttcagaatcctataagaaatttgcatcaaaaagatactataaaacaatgtgattatgaaaaagaattggatgttatttttatttttcgcagcttctgctgcactaacttttagtggttgtagtgatgatgacaatagcgatgttcctgaaaacacacatttggtttcaaaagaagtacaggctgcatttaatgcaaaatatccgcaagctaaagacgtggaatgggagctgaaaggtgattatgctgtagtagattttaattgggatggtggggagcattctgcatggttcaatccgttatcggctgcctggtatatgacagaaacagatgttcgttatgaaaatcttcccgaacctatacttactgcccataaagcaagcaaatatgctgattggcgggtggatgatgtggataagttgactcgtgagggaatggaaactctttatgtcattgaggtagaaaaaggagagtctgagctggatttgttttatttgtctacaggcatattggtaaaaactgttgtagataccggatacgaagaagattatgatgattatttgccgcagcctgatgcaaatggcattatagctattgtcaagcagaaatatcctaatgcgacaattgtggaaatagaacgtgagaaaggtttgcaggaagttactattttagatgaaaacaaagagaaagaggtttatttcaatgagcggaacgaatggatgggaacaagctgggatgtacaggtggcaaatttaccggaagcggtaaaaaaatcggttatggaaaaatattcagactatgtgatagatgatgctgattatgtagtgacacctgataatgaatggtatatacttgatttggaaaacaaacagacaggtaaagagtttaaagcaaaggtagataaggacggtacttggttataattttattatcccatagacttatgctaggtaatcaggtggttgtttactagggccagacagcttttttgttctcaaatattatgacttttgtggcaggcagttggagtgtggaatttgtatttctgttatacatatttttgtgattttgatgagagggtaaaagataaatatggaaaaatagatttgtatgatatatgatattcagttacatttgcatttagaataaaaaatagcatgatggaaacaggattaacttatacttcgactgttgtcgtttcaaaagaaaatgtagctgccactatgggtagtggcgatttgaatgtgtttgctactcccgctatggtagcgttgatggaaaatgctgccatgaatgcggtggcaggcggtttgcccgaaggttctactacagtaggagccatgatgaacactactcatatcaagccctcggctgtgggagatacggtttcggctactgccgtattaaaagaggtagaaggcagaaaacttacttttgaagtgcgggcacaagatagcaagggtatgattggggaaggtacacatgtacgttatattgtggacaaggagaagtttatgagtaaattgtcttaataattatttgaaattataccacaactgagatcttctgtccttttgtgattctgaatattgtttatttcgataacgggaggatcagaaagaggaatgaagaatgtgctttaataaaaaaatctttaaggagagcaaaactaatgacaatctggaaaacagtgttattagagttctgtcctcctttttcttattcttgcagtgctaggatatattcgtataatttcttataaaacgggtgttttgtcagcgtagaggcatctcctaatataataagtttcatacgtgcacgtgtaatagcgacattcattcttcgcaaatcattcaaaaaaccgatttgtccgtcttcattggcacgtaccagactgattaagatcacatcccgttcctgcccttggaaaccgtctaccgtattgatggtgatgaggtgtcggtaaggcttgaaaaatgcatcccgttttatcagttggcggagatattgtacttgtgctttataaggagaaatcagtcctacatcaatccgttcttccaaaaaacgtttttttcctattttattaatgtaatgggtcagttgggaaatggaaagtgccgcctcggctttattgatacggccgaaactttcacctacaaattcttcattgcagttcattccttccgtattcacccattctataggagtgtcgtaatccagaatcccacggtattttacttcgggagcggatttcaattccccttgatagaaccattccgaagagaaatgcatgatctcatcattcattctgtattgaaccttcagcagggaaacagtttccggtttgttctgcacaatttcctgcatcaaagtctgatccaatccgcctcgtgcagcttccacacattttatggtaggagggagctggcaatggtctcctgccaggactatccggtctgctttgcggatggcgatccagcaagcgggttccaatgcttgtgcggcttcatctataaataaagttccgaatctacaccctgtcagaacccggttggcagagcttaccaatgtgcaagctatgacacgggcttcactgaacaaggcttcgttgatgcggatctccagctcggtggcctggtctttcaatgaattaattttcagacgtatattttcccgttccgctcccttgcgcgaacggctgtagagttcgcgtatggcctttcggatgctccaaagctgcggataatccggatgactttcgaagcgtcgttcgtaggtaaaggataacatcttatcattgacacgggtaggattaccaatacggagaacgggaacgccccggtctaccagtttctcactaatccagtctacagccatattgctttgagcgcataccatcacttggttttcccggtgtagcgtttcataaatggcttctactagcgtggtggtctttccagttccgggagggccgtggacaatggccacatcttttgcatgcattactttgttcacagcctcttcttgtgaattattcagccacgggaaacgagtgaaaccaaaactgaacgtttgtgcttttaatgtgccgtggaaaatatcccgtagttctgccagacgattgtcttttgctttaataacttggcttaaggcttcaaacatcagtcggtaactggtttcatcaaaataaagttgaacccccaactgacgctcggttgcctgtatgctgagtaaagcgtctgccgatggcagaacgatgaccatgcggtcctcatccacataattcacagtggctgtgaaattgaaataatggatgtttcccggggcgtcttgagtgaaaaaacaaacaggacgtccgaattcgaatacatgttctatttctttgtcctcctgtctttccatctctataaccagttggtttaaagagttgtaatagcttcttcctgtgctgacaggataccagcacatgccacgtttcactttgcggtcgatgcccatcgcttcggtttgttgcttgaaagtttctttttcgtaattatattccatgtgaagcaacaactctttgcgttgtaatttgttaataatagtagagagggatttatgctggttcatatttattcttttttctataagaattgcaaagataataattatccctctaaaagcactttatgttttattttgttaaacgtattatagattacgcaagaattcaattcttttttctatcttgccaaaaataaaaagaatctaaaactgtaataattataaattgtgatggatatggtatatgacttggacatgttaaaagccttttatgcttcttttgaaaagaagatagggcgggtaagagcagtgttgcagcgtccgttgacgttggcagaaaagattctgtacacgcatctgtatgatgatgcactgttgaagaaatacaaacgtggtgaggattatgtgaatttccgacccgaccgtgtggctatgcaggatgcgacggcacagatggcgctgctgcaatttatcaatgccggtaaggagactgtggctgtcccttctaccgtgcattgtgaccacttgatccaagcatataaaggtgccggtccggatattgcgacagcaacagaaagtaaccgcgaggtatatgactttctgagggatgtgtcttcgcgctttggcattggattctggaagccgggtgcgggtatcattcatcaggtagtgctggagaattatgctttccccggaggtatgatggtgggtactgattcccatactccgaatgccggaggtttgggaatggtggcaatcggagtcggcggtgctgatgcggtggatgtcatgaccggtatggagtgggagctgaaaatgccgaaactgatcggagtacatttgaaaggtgcgttgaacggatgggcttctccgaaagatgtcattttaaaactggctggaattctgactgtgaaaggggggacgaatgccattatcgaatattttggagaaggtacggcttcactctcggctaccggcaaagcgactatttgtaatatgggcgcagaggtgggggctacgacttctcttttcccgtatgacgaacggatgaaggtgtatctggaggcgaccggacgtaaggaggtagctgcaatggccgatgcagtgtctgccgatttgcaggctgatgcagaagtggttgctgatccgtcagcttattatgaccgggtgattgaaattgatttgtccgaacttgaaccttatattaatggtccgttcacaccagatgccgctactcctatttcagagtttgccgagaaagtgctggcccatggttatccgcgcaaaatggaagtgggcttgattggttcatgtaccaattcatcctaccaggatttaagccgtgcggcatctattgcccgacaggtagatgaaaaacagttgagtgtggcggctccgttgattgttaatccgggatcggaacagattcgcgctacagccgaacgtgacggcatgatagatgcttttctgaaaataggagctactataatggccaatgcttgcggcccttgtatcggacaatggaagcggcacacagatgatccggcccgcaagaactcgattgtgacctctttcaaccgtaattttgccaaacgtgcggacggtaatccgaatacacatgcgtttgtagcttctcccgaagtggtgctggccctgaccattgcaggtgatttgtgtttcaatccgttgaaggatgctttgatcaatcaggagggtgaaaaggtgaaactgagagttccggaaggggatgaattgccgtcgaccggttttactcagggaaatcccggttatttggctcctgccggtgcacaggtggaaattaagatgaatcccgaatcacaacgtttgcaattattggctccgttcccggcatgggatggaaaggattttacggatatgcctttgctgattaaggctcaaggtaaatgtaccacagatcatatttcaatggcaggtccgtggttgcgtttccgtggtcatctggaaaatatttcggataatatgctgatgggggcggtgaacgctttcaatggtgaaacgaacaaggtgtggaaccgtttgacaaatacgtatgagggtgtgtcgggtacggccaagcaatataaggccaaaagcattaactctattgtcgttgcggaggaaaattatggcgaaggttccagtcgtgaacatgccgctatggagcctcgtttcctgaatgtaaaggttattctagcgaagagttttgcccgcatccatgaaacgaatctgaagaagcagggaatgttggcagtgacctttatagacaaagcggactacgataagattcaagaacatgatttgattaccgtcagcggattggcggattttgctcccggaaggaatctgactgtgactttacaccatgaagatggcactcaggatagttttgaagtacagcatacttataacgaacagcagataggttggttccgtgccggctctgctctaaatgcaagataaaagatgaaaaagacagtaccttatattacaggtgacggggtgggagtggaaatcactcccgctatgcaagccatagtcaatgcagccgtgaagaaggcgtatggcaatgaacatgaaatagaatggatggaagttttggcaggagagcatgcttttaatgaaacaggctcctggttaccggatgagacaatgaaagcgtttcaagaatatggcgtagggattaaggggccgttgaccactccggtgggaggtggcatccgctctttgaatgtggctttgcgccagacgttggatttgtatgtatgcttgcgtcccgtacgctggttccgtggagtggtatctccggtgaaggagccgcaaaaagtggacatgcatattttccgtgaaaatacggaggatatttatgcaggtatagaatgggaagccggaacaccggaagctgagaagttctatcgttttttgcatgatgaaatgggagtggctaaagtgcgctttcctgaaagttcttcgtttggtgtaaaaccggtgtccagagaaggaacggaacgtttggtgcgtgcggcgtgcaaatacgctttggagcatggtctgccgtcggttacgctggtgcataaaggaaatattatgaagtttactgaaggcggcttcaagaaatgggggtatgaactggcggaacgtgagttcggagatgccattgcgtcaggcaaattagtgataaaagactgcattgccgatgcattcttgcagaataccttattgattcccgaagagtattcggtggtggctaccttaaatttgaacggagattacatttcagaccagttggcagccatggtaggaggtattggaatcgctcccggagcgaacatcaattacaacaccggtcatgccatttttgaagcaactcacggtacggctcctaatattgccggaaaggatgtggtgaatccttgttcattaattctctcggctgttatgatgttggagcattttggttggaataaggcggcggagctgatagtaaatgctttggaatccagctttggcgaggaacgggctactcatgatcttgcccgttttatgcccggaggtgtttcgctcggtacatcagcatttacaaaagaaatcatagaaagaataaactcctaaaaactcacggatatgaagaaagaatatatcatttacaagctctccgaggaaatgaagaatgcaacccggattgagaacgaattgttcaagaagtttgatgtaaaacgcggattgcgtaacgaggacggcactggtgttttggtagggttgaccaagataggtaacgtagtagggtatgaacgtattcccggtggaggtttgaagccgatccccggcaaacttttctatcgtgggtatgatttggaagatttggcacatagcatcattaaggagaaacgttttggttttgaggaagtggcttatctgttgttgtccggtcatttgcctgataaggaggagttggcatctttcagtgagttgattaatgacaataccccgttggaacagaaaaccaaaatgaatatcatcgagttggagggaaataacattatgaacattctggcccgtagcgtgcttgaaatgtaccgttttgacccgcaggcggatgatacttcgcgcgataacctgatgcgtcagagtattgacttgatatccaagttcccgaccattattgcatacgcttataacatgttgcgccatgccacgtatggtcgttcgttgcatatccgtcatccgcgtgaaaaactgtctatcgcagaaaacttcctgtatatgttgaaaaaggattatacggagcttgatgcgcgcacgcttgatttgctgttggtacttcaggctgaacacggaggtggtaataactctacttttaccgtccgtgtagtttcatccagccgcacggatacttattcggccatcgccgcaggtatcggttcgttgaaaggtccgcttcatggaggggcaaatatccaagtggcggatatgttccatcatttgcaggaaaacatcaaggattggacgaatgtggacgaaattgatacttactttacccgtatgttgaataaggaagcgtatgataagaccggtctgatttatggtatcggtcatgcggtctatacgatatccgatcctcgtgccatcttgttgaaagaattggctcgtgatttggcaaaagaaaaaggaaaggaggaagaatttgcttttctggagctattggaggaacgtgccattgctatgttcggaaagattaagaataacggcaagacggtgtctagcaatatcgatttctattcaggtttcgtatatgaaatgattggtctgccacaggaaatatttacacctttgtttgcgatggctcgtatcgtggggtggtgcgcacaccgcaatgaggagctgaattttgaaggaaaacgcattattcgtccggcatacaagaatgtgttggaagaactggaatatgtgcctttgaaacagagataacggtttagaggcacctcggttggcgataagctttggtattattgttttagcttggaggcaataaggtctgtattgttgtaaagaaaagtaagatatcttcgtgggcaaagtaagatatgtttccgagcaaagtaacaccacatatttgttccacgaagatatcttacttttttcagtgagatatggtcgttcataatactctatatagagtaccttgaaaaatccttcaaatctttcagcctgctcgcaaatgccctgcccgtcggcttttcggctgaagaattgggttcgggaatccttcagccagaccggtgttcttccagttcttagggaattggtttttctgaaggatattttccggctgaaacatttcacaatgcatatccttcagccggaatgccgacgggcagggcgtttgcggaatggctgaaagatctgaagtaaaaataaggcgtttcggcatgtagataccgttatgggaaaaaacaacaggtcaaattttaaaaagctcttgttctttcaatgaaaacgtcttgttcttttctgaaaagaacaaggcctttaaaaaaaagaacaagacgtttgaaaggttagtaacgtgtatgccggaaggttaataacgtgtgggatgatacgttactattgaatatgttacaattataattcattatattgcatactatacatatcaaaaccgtcagcccaataattgcgtttgatttcattcagtgtgaatccttgcttttcatagaatttatatgctaattgcgaggttcggactgttatttttttgatactgggaatagcctttaaaacctcaattctgtatcttaaaagctttttacctaaagatttgccttgatagtcgggatgcataatatcccaacttatttttccaatggttcttttttctgcgaaatttatcccgccgcatccaaccactttcccgtcaacgagcaagacataatagagctctatttctttatccaaataattgctcaaatcattaacttcctcttttgcaaagaagttgggtgtgtttaatttaattaaattcatgacaacttctttatctgtcgtcaaatattctctaattacaattgaattatcttgtgtcatagaactttcgtttgaaatttattggtaaagatagtgataaaaacgagagttagagcggataggttcaagaaggttgaaaataaaggttttagcgagaatttgactgcaaagatgaacccaagcgaaacccttctcgaagccaattgaaaccggagttgcgttaccatcccgttactctgttccgaatggtaaaggcggttttgggaggatttcaaaacgctgaattacaggcacgattcgggaatcttcgactgtaaaaacggtcggattttcggattttgggcttgctgccgtgaaaaaagtctgttttccgcctcgattgcactgattcgctgcggtctgcatttcgtcgaacagctctacaagtaataattttgtttcattaaaaatcgtagagttatgagatcgacattcaaagttttgttttatctgaaatgcaatgccccgaaaaaggacgggcttattcccgtcatgtgccgtatcacgataaacggcaaaatagcccagttcagttgcaagctggacgtggaggagaagtcgtggaacgtggagttaggccgtgtctccggccgcagcatcgctgcacaggaggccaaccgtatgctggataaaatccgtgtaggtatcaaccaagcctaccagaagatcgccgaccgggataattatgttaccgccgagaaagtgcgcaacgcctatctcggtttggggatgaaccatgaaacactactggcggtattccgtcagcacaacgaggattacgggaagcaggtgggcaagctcaaaagcccgcgcagctattggaaatactgcactatgtacaaacacctctcggagttcgtcgaaaagcggtataaggtcagcgacatcgcgttcaaagagcttactccggcatttatcacggacttcgagttgttcctgcgggtagaaaagaatcactgcaacaacacggtctggtcttatatgatgccgttccggaaaataatctatatggccgtcaataacggtttgttgcagcgcgacccgttcttcgcgtacagcatcacgaaggaggagaccaaacggggttttctgacccaagaggaaatcacactcctgatcaacggcacattcaaaaagaaaagctacgagctgatccgcgatctgttcatcttctgcacctttacgggtttgagctggacggatatggcgaacctgacgaaagccaacctgcgcacctcgttcgacgggcatctgtggatcgacacgaactgccagaaaacaggcgtcgaaacgaatatccggttgttggacgttgccagacacatcatcgagaaatacgacggcatggccgaaagggacaaactgctgccagttccctgttacgccaactgcaagaacggcatcaaagcaatagcgaagaagtgcggtatcgaaaagaacgtcacgtggcattaaagcaggcatattgaattgcctttgtcgctgaatttgaatagattgcaaagattagtttcttgataggtaacgatttggaaacgagtgaagttctgtattttacctcgtcttgcattaaatcaaaagaacgcctttttgcaatgcaaagatagtgattagaattgatttacaataaacttcatcctgcaaaatcgtgcaaaatcgcagattcctgtgcatttttattgttcaaatactgctaacttcactaaaaatgagtaactttgcaaactaacaagtattggttttgccatggttataagaatgataaaattgacatcactatttgtcaatacggaaaattatagatttgagcctttatcatcacaaaaagaagcaatagataagatgatagaggatcaaggggataaattatattctcttgtggacgatattgtaaccaatggtcttagccccgtcgatttgattattgtaacacccaacgaagacagcaataagtatgttgtacttgaaggaaataggcgaataacgtcattaaaactattaaataatccgacactaatagatgacaaatactctcctttaaggaagaaatttcagaaattacaaaaagaaaaacctaatgctatttctgaattgaagaatattgcttgtgctgtttttgaaacccctactgaagctgatatatggataaaacgtaaacactctggagaacttaatggtatcggaactgtcacttggaacgctcaacaaaagcaaagattcgaggagaagacagaaggaaaatcatcaattccattgcaaattatcactttgctgaaatcacaagaagaggtttctgatacgattaaggattcattatctaaattaaacattaccaacttgcaacgtttgatgtcggatccatatgttagagaacaccttggcttggaaattaacaatggaattttagtttcaaaggttgaagtgtccgaagtcattaaggggcttttaaaagttgttacagacattctgaatccggaattcaaagtttctgatatctataacagagaaaaaagaaagcaatatattgataattttgacaagagtcaaaagccagatttgtctaatgaagcatctgaacaatggagtgttcaagatattgaaaacaataaagaacaagcatcaagaaatagcgagaaacaagaaataaaaggggataaaaacaggaaaacaagaaacagaggagctttagtgcccaagtctttgaatttacatatcagtaacccgaaaattaataaaattttcgaggagctaaaacatgttcaggtcaagacatgccccaatgcatcttcagtccttttaagagtatttttagaactatctgttgatgcctatttggagaaatttgatttagtaagaaacaatgctattacagcttgttcttctggtgaaagtttgcaagggaaagttggtaaagtcttaaatcatatgacccaattaggaacaatgagtaatgacttatcaaagggcataaggtctgaaataaatgataaaaattcagttctttcaatcgaatcattgaatgcatatgttcataacgagtttttctaccctaaagcagataatttgattactggatgggacaacatagaaagtttttttatccaattgtgggaatcaataaaaaataaagaataatattatggaatttctatcacctttaagataccctggcggtaaggctaaagttgctgatttcgtacaatgcttaatcaaagaaaacgcattgctcgatggcacttatgttgaaccatatgttggaggtggttccgttgcattatctttgctctttaatgaatatgtcagcgacatacatataaatgataaggatatatctatttatgccttttggtatagtgccttaaataacgtggatgctctctgcaagatgataaaggatacccctttaaatgttgaaacttggtttaaacaaaaagaaattcaatccaataaagagaattctgacttgttagaattaggcttttctacattcttcttgaataggactaatcgctcaggaatcttgaaagcaggagtcattggcggttatgaccaaactggaaattataagattgatgcaagattcaacaaagaagatttgataaaaaggattcaacgtatagcagattatgcagatagaatccatttaacaaatgaagatgctgtttctttagtacaacggttaaaaaatgaattaccgtataatacgttattttatttagacccaccatactatgtaaaaggtaaaggactttatctgaattactataatgatacagatcatcaaaatatagctaacactataagtgagattgcaaattgtaagtggattgtctcttatgataatgtaccattcataaccagcctatattcaaaatatagacagcaatgttttgaattgaattatagtgcgagtaattccgggaaaggtaaagagataatggtattttgcgatggcatagttatccccaaacacaaactatttaaccattctacaaagtgaaaataacgcacattcatatcgaaagatttcgaggatttcaaaatgaagattttgaagtaggctctttgttaacagcaattgcagggcaaaacggaactcaaaagtcaacattacttggtattataacacaaactttcactcttaagacagaagattctatgagagttgaaaagcccttgtgtggtggtagttatatttccgcattcaaagataagtttaggttatcacctacttttgataaaccaaaaggtcatgaatggactatttcctttgatgcaggaatggatgattttactgttgaaagtatcaaacgaacaggagatcctaatgtccgtttttggaaaaaaggagctaggcaagaaggagatggatacatttccttccccacaatctttttaagtctaaagcgattagttccagtggcagaggaagctaaaatcattacagatgatacattattaacgcaagaagaactaaatgagtttaagcaattgcataataaaattctaatagcacaaactcccatttcttccgcaacaacaatcacatcaaaaaacaagcaatctataggtgtatccacagaactatacgattggaatcaaaactctatggggcaagataatttaggtaaaattatcttggcgttattttcttttaaaagattacatgacaaatatccccgacaatacaaaggcggtattttggccattgatgagatggatgcaacaatgtatcccgcatcccaagtagagttgttaaaggttttgcgcaaatatgcatctaagttgaatttgcaaattttatttacaactcattcaatgtctctttttaaggcaatggatgatttagttcaagaagtaactaaaaaagaagaaacagccaatcaagcaaagatcctttaccttaagaaggttgatgataagattgcaattaaacagggcgtgaacttcaaaggcattcaattggatttaaatgttgttgcagaaggaaataatcgcaagaaaaacagaattacagcatatacggaagacaaggaaaatatcttatttgtaaaagctattttaaagagcaaggcttttgtgttggattttgtggatgtaacattaccatgttcaacattaatggaacttgtaaccaaaagagtgcctgcttttatatatccatattctattgttatattagatggggatgttagaatgaataaaaatgatctcaggaaaatcaacaatgcagataacattttgattttaccgggaaataagtctccagaaagactattggcctcttatttgtataatctatctgatgtagacccattatggtctaagattgcagatgggtacacaaaacaattctgtttccgagagtattccatggaacaaataaatgcaggaggtgaactggggcgccaaaatgcaaaaaaatggtttaatagccaattagaatattgggggcgaaacggttgtaaagtccttaatccttttttaagttcaatttctgaggaggcacaagagtttagaacaaattttgacaatatgattaaacagtatatccatgactaaactttcggtgtccacacttcattgtggacaccgaaagtttagtcatgaaattgcttgatataaaatctaggtacattttatgtacgatcttatcccaactcttttttctgtgtctaagtctgggtacaataaaaaagcatgtccagtttgctaatggcgttacgagcttcctgtatatgtctgatgctgaaatgcaacgtgatggtactttgatgattggcgggggagggaagtcggaaatcaatggaaaacctgtagaaaatagtacattcctctctaagtaaagccttctctgcgataaaaatcgtatccttttcttgcaaaaaatctcttaattgttgctttcctctgatttttcccttaaatttgttagtgacttactaaatttaatacagggaggaacgagtatgggacaacagacttttgaatttttgttattagcaatgtccgcacttgcggtgattgtatttgtagccctctattatgtacgtgccggttatggtatgttccacaccccgaaatggggactttcagtgaacaataaattaggttgggtgctgatggaagcacctgtattccttgtaatgctttatctgtggtggaacagcagcgtgcgttttgatgccgctcctttcctcttttttcttctttttgaattacattatttccagcgttcttttctattccctttcctgatgaagggaaagagccggatgccccttgccattatgttgatgggagtggtctttaatgtcctgaacggactgatgcagggcgaatggttgttctatctggctccggaaggactctatacagatgcctggctcagtactccttctttttggcttgggatcattttgttctttatagggatgggcattaatctgcattccgacagtgtgatccgccatttacgtaaaccgggcgatacacgccattatttgccgcagaagggaatgtaccgatatgtcacttcgggcaactattttggcgagttggtggaatggatagggtttgccgtactcacttgttcgcctgctgcatgggtgtttgtactgtggacgtttgctaatttggctccacgtgccaattccatccgtaaccgttaccgggaagagtttggtaaggatgcggtaggaaaaaagaaaagaatgattccttttatttattgaatttggatagtatatcgtttctgtttcaggaaatgatgaaagcgaaacataacatatgaatgatgaactctaaattatttactcccgcctctatcgggccgctgactttgcgtaaccgtacgattcgttcggctgcttttgagagcatgtgtccgggcaatgcgccgtcccggcaattgaaggattatcactgttcggtggcagcaggtggagtgggaatgactactattgcttatgcagctgttacacaaagtggcctttctttcgacaggcaattgtggatgcgccctgaaattataccgggattaagggaaataaccgatgcggttcataaagaaggagctgctgcaagcattcagttgggacattgtggaaatatgtcgcacaaaagtatttgtggggtaacacccgtaggagcttcttccggttttaatctttattcgcctacttttgtgcgtggcttgcgcaaggaggaactgccacagatggcaaaggcatacggtcagtcggttaattgggcacgtgaggccggatttgacgcggtggaggtacatgcagggcatggctatcttatcagtcagtttctttcaccttacaccaatcatcgtaaggacgagttcggcggctcgttggagaaccgtatgcgctttatggatatggtaatggaggaagtgatgcgtgccgcaggtaatgacatggccgttctggtaaaaaccaatatgcgtgacggttttaaaggcggcatggaaatagatgaagctgtgcaggtagcgaaacggttggtacaagatggggctcatgcgttggtgctgagcggaggctttgtaagcaaagcgcctatgtatgtcatgcggggagcgatgcctataaaaagtatgacacattatatgaactgctggtggctgaaatatggggtacgtatggtaggtaaatggatgattccgacagtaccttttaaagaggcttatttcttggaagatgcattaagattcagaacagaaataaaggaaattccgttagtatatgtgggagggctggtatctcgtgaaaagatagatgaggtattggatgatggttttgaatttgtacagatgggaagggcgttgctgaatgaacctggttttgtgaatcggttgcggactgaagaaaaggctcgttgcaattgcggtcatagtaattattgtattgcgagaatgtacactattgatatggcatgtcacaaacatctggaagagaaattacccctttgcttggaacgtgaaatagaaaaattagagaaccaatgagtaaattagccataataaccggtgccgatggaggaatgggtactgaaataacccgtgcggtagcacaggccggctatcatgtaataatgttgtgttacactctttttaaaggagaggagcgtaagaaccagttgattttggaaactggcaataaagagatagaagtcagacaagttgatctttcttccatggcttctgtgactaatatcgcggacgacttgttggggcgcggaaagcatatcgatttactgatgaacaatgcgggaacaatgagttccggtggtttgattacaacggaggatggtttggaatatacggtagctgtgaattatgtggccccttttttactgactttgaaattattgcctctgatgggtcaaggaacccggattgtgaacatggtttcttgcacgtattccatagggaagattactcctgaatttttgattcgtggaaaaagaggcagtttttggcgtatccctgtttacagtaatacaaaattggctttgtggctttttacccgtgaactttctgaaaggctgaaaacagaaggaattactgtcaatgctgccgatcctggtattgtttctaccaatatcatccgtatggatatgtggtttgacccgttgactgacatactgttccgtccttgtatccgtactccgaagcaaggagccgcgacagctgtcagtttgcttttggatgatcgatggaaagaagttacagggcaaatgttcgcttcttgcaagcctaaaaaagtaaaggataagtttatgaatcatccacaggcaagacagctttgggcggatacgaaagcatatttggagaaactgaaattggaggagccaattgtctgagaattcctttaaatacataaaaagccgtatcattacttaaaagtagagtggatacggcttttatggtcggtgaagagtgtctggtttcggattgcagtgtagttgaggttattctttcttggctgcttgttcagccagcatctgttcacggcttttactttgagtcacaatataaactcccgtgaataccagtgccacagctattcctttggcaatgccgaaggttcccattcctaacaagatagagacactggttcctacgataggctgcacatagttgtacatactgatgacagtagggcgcaatgttttctgtccgatcatcatcagaatataggcaagaaatgttccacctacaatgacgtaggctacgcaggcccatgtagaagtggaaatttcgtgaaaatgtatggtcgagacctcatgataggaaaatggaataaagcagatggctgcataggtgaacatccatttcattaaagtaaatatgttgtatctgctgatcagtcctttaaaaatagccagatagaatgagaaactgatttgtgccaacaggcaaagcaaatctccgggaatacttccgccttttccatctgttgagccttgactgcttaatatgagtgtcaaggctccgatggaacctagaaaaatgccaatcacttttttccctgtaaccggttctttcagataaatggcagcgacaatcatagtagcgataggggctgtggttgttacaatggaagcatcgatgggggaagtcagtgatagtccgaaagtgaaacatccctgattcaggacgatacccaataatcctgcaaagaacaacatcatcaagtcgtgcggctttacttgttctttaggagcgaaaatagaagctatccaaaaacagatagcacctcctgtcattcgaaatgtagcgagggaaagacctgaaataccgttttctaacgccgttttaccaattggggacatcaatccccacattatggcagcgcctagcaatgccaaatgtcctttgtacttttgaatagccattctttttaccttaaataacagtgcaaatgtaggaggttttttttatattttctatctttgcttataagtaaatctatcaaaaatgaaaaaacaagctgattatataaaacgtattgagataaagcggctttggggccgtaaagatatctcatgggaactgcgtccggatgtcaatattctgagcggagtgaatggtatcggcaagagcactatcctgaacagatctgtgaacagtctgacggctttggaaggcggagcgttgagtaacggttcgactcccggggtacattttgtcttttctccggaagatgcgaccctgatacactttgatgtaatccgtagttttgaccgtccgttgattcattcggaacttctcgaaaagatggcggataagaatgttaagacagaactggattggcaactttatcaattgcagcggcgttatttggattatcaggtaaatattggtaaccgcattattgagtgccttacttccggtggccctgacggtcagcttcgtgctgccgaaatgtcttaccccaagacaaaattccaggatttgatggatgacttgtttggtgaaaccggtaaaaaaatcattcgtaaaagtaatgagattttgtttgaacaggatggagatatactttatccttatcaactgtcttccggtgagaagcagattttggttatcttgctgacggttctggtacaagacaaccgtcggggagtcctgtttatggatgaacctgaagtatccttgcatgtggaatggcagcaacgccttatttcattgatacggcaattgaatcctaatgtacagattgtgttgacaactcattcgcctgctgtgattatggatggctggctggatgcagtgaccgaggtgagtgatattacaaaataaacaatttctaacgacgatactatgggaaaaagattgtccgagaatctgtcctccttatatattggtgcggccaacaaattgaaacctaaatgttcgcgacgcaagattattgcatacgttgagagctatgatgatatttcattctggcgtaccttgttaggtgaatacgaaaatgaaactcgttatttcgaagtgatgcttccttcgaaaaccactttggctaaaggtaagaagtctgtgctgatgaatgaactgggacctcagttgggacaaaatatgatagcttgtgtagatagtgattatgactatctgttacagggggctacccatacttcacgttatattataaataacaaatatgtttttcatacctatgcatatgctatagaaaactatcagtgttatgctgaagcattgcatgaggtttgtgtcatggcaacgttgaatgaccatccgttggtggattttgtcgcttttatgcgtatgtattcccaaatagcttatccgttgttcatttggtcggtgtggttttatagaaaacataatctttccgaattttctttgcttgacttctgttcgtatgtgaaattggatagagtcagtgtctatcatcctgaacggagtttagagagtatgagccgcagggtgaggcgtaaattattggaactggaacgccgccatccgaaagccttggaggaaatagaggcgatgaagcgggaatttgccaaattgggagtgaatgaggacaatacctatatgtttattcaaggacatcacattatggatagtgtagtgatgagattgttagtacctgtctgcaatgtgttacgccgtgaacgtgaaacggagattaaagaactggcagagcataatatgcagtttcataatgaactgaccagctatcagcgccggcagttgggagtagacattgtactccgcaaacataccagctataagttatcacctctttataaaaaattggaagcagatatagaacgtttcttgaaacatatctgaatcggttatttcttatgggaggcaagtgctttggctatgaaatgatctagtgagaatttacccggtcctgctatatacaataatatgaatactaccagataaataaaggctaattctttaacggcgaaaggatcagaaccatgaacaacaaagaatgcgatacacatggtgaagatcatcggaagcattgccaagcgataaaggaatccgaaaatgaaagccatcgaacaaaccatttcaccaaaaatagccagtaccagtgaaagttggctgcctattcctaaaggatcgggaaaactgccggacatgacatcgtagttggcccatttctgtacaccgtgcgacatgagtaaaataccaaacaggattcgtaaagctaatatcagaagtgacatagcagtgccatcgggcttggatggaaataagaatttataaatgactgacataatacgtttttatttttttgtttatactatatttatataaacgtaacaaaagggtgaaatgttcaaatcattcactgtttgtttctttggagatggttgattcgctcatattaattttttattgtacctcaaatccgcaactacgcgcctaatatgatacagaagcgaaaagaatctgcatcgttagtaaaaagggggcacagtgcatcgaatgtcaccataaagacatataaatgccccttaccccaccatgcgacttgaggcaatacgcaaaatcacgactataagttgtcggtgttatccaaagtcattctggaacacattggcataagcattgttgcatgaatagatattcagcacatacttccttgatgtcctgacccatttggctggcacagagatgaacttaaagacaaacgtcttgatgcggcttgttgctttgagtccgaacctcttcacgtcaagcctcgccatgatgaatttatagaagttgcgtatgagtgccataagcagaagaaacaccgtgttttctcccataaaggattttggaagcctgttccagccgaatccgttattcatatcatcgaagatgcgttccttccctccacggaggttatagaattcgacaatctctttctcggaagactcgtagtcatttgtaaggatgcagcggtaggtgtattctccttcccacaggtcgagttcgccgtctatccgcttctgtctttgaatcacaagacggtatgccttccctttccatttctcgatgagaatggaggccagctcaaactcaatgccgcccaattccactttcttccaacctctgagggcaaagatgtcattgtagagcgaactgcatcggttagcacggatatagaaggtcttgcagtgtttagcaatctcttccactatctcttcagaacacgagccgcaatcagctctgaaacggttgataataagcttgttttgttcaaacctttcaaagaacctcttcagcgtgtccttctggtggaaacggacatttgtgttgccgtcgctgttctcaatgccgacaatcaagttgccaataaccgccacgccagggcgataaccaaggaacttcttgtatgtaggcttcgcatcaaacttctcagcctctatgaactggtggtcgaagtcaacgtcatacccctcgccctctttcagctgccctgtggacaataggcaattgaggagcagtgtattcagcttgtctgccgtgttgaagtcgtaggtcttgccagtgtcggatgtgtaggaaatgttatcctgggtcagttcctttatggctctaagaatcgtgtcggcactgcatgtgcgaagtgtcggatgaagcgaaaggtggtacatcagatgagtggtgacatcctcgatgcatgagccgccacaaaaataaacgctcataagcgaacggatgatttcgctgtattgataaccatacagcctgcatctcataccgagggttgagtcgattacagatgagagtctggagtcaaattgctccattattgaaaatattcctccaaaaggagtgagtttctcggatttaattgctacctttgccatgtctgtcgggtttgatacatattttgatttgcaacactaagataggtgaaaaatctgacatggcaaattcctgagcaactttttgttgctcaggtacttaaaaagttatatttgtaatagtgttgcggaattaaggttgtagaaaaactcttgaaacgaatgtcaggacttcgtgcaaaaggaataaaaaaagaacaattataataaatattagttctatatggtataatgtttgtcgtaccttaggtaacgataaaagctaacatacgaatatatgaaaacaattaaatgtattggagtgctgacatccggaggggatgcttctggcatgaatgccactatccgtgcggtaacccggagtgcaatttgtaacggatttaaagtgaagggtatttatagaggatatgaagggctgattaatggagaagtgaaggaactgaccacccaggatgtgagcagtgttattcaacgtggaggaacgatgttgaagacagcccgttctgctgaattccaaacagtagaaggacgcaagaaagcatacgatactatgcagcgagaaggaattgatgctttggtgattataggtggaaatggttctattacaggagcccggatttttgcggaagaatatgatgtgccttgtatcgggttacctggtacaatagataatgatctttatggtactgactttaccataggttacgatacggctttaaatacgattgtggaatgtgtggataaaatccgtgatacggcaacctctcacgaccgtatattctttgtggaagtgatgggacgtgatgccggttttctggctcaaaacagtgccattgcttctggtgctgaggcagcgattattcctgaagatcgtacggatgtggatcaattggagaaatttatcgggcgcggttttcgtaagacaaagaatagcagtattgttattgtttccgagagtccgaaagacggaggtgccatgcattatgcagagcgtgtcaagaaagaatatcctcaatatgatgtgcgtgttaccattttagggcatttgcaacgtggaggttcgcctagtgcttatgaccgtattcttgccagccgtctgggggcgggagctattgatgccatattggaagggcagcgcaacgtgatgattggcattcataacgatgaggtggtatatgtacctttttctgaggcaattaaaaaagacaagccccttgataaatcgcttatcaaggtgcttgatgaattatctatttaatgaaaataatcatgaaaggagaagcggaagtaattcttctgctttttctatgatatgtgccggatgtaaggcttccaattctgtgcgcggccggaatccccatgccacacctatagctgttactccggcatgatgcgctgtttgcatatctacattagaatcacctacataaagtatatcttcctgtttgactcctgcttttgtcatgatttcgtttatgatggatggatcgggttttgcggggataccttcgcgttgtcccagtacttccacaaagtttatttctggaaaatagtgtgctattaactttcgggtagctgcttggtatttattggaggcgaccgctatcatgatcccttgctgttgcagtgtttttaataattcggagataccgggataagggcggcttaaatcggcattgtgctcatcataataagggatgaattgtgaacgtatctttaatacattctcttccgtacgctccccttcaggcagagcacgctcaaataatttattgattccgtttcctacaaaaaaacggtatgcttccatttcatgtgtaggatagccataatactgtaaggcttggttggtggcggcagctaggtcggcaatagtgttcagtaatgtgccgtccaggtcgaatattacaagtttcttcatatttgtacttcttttatcggtgcaaagttactatttttgtatgcaaactaataataatgcttatgaactttctagaattagtgaaggcgcgctactctgcacgcaaatatgccaatcgtcctattgaggctgaaaagttggattatatcatggaatgtgtacgttttgcaccgtctgcagttaattttcaaccatggcgtttccgtattgttacagatgaggccgtactgaaaacgttgtattcatgttataaacgggaatggcttgctacggctccttgtatcattgtggcttgtgtgaatcataatgagtcttggcatcggcgtgccgataataaggatcacgctgatattgacattgctattgcagtagaacatctttgtctggctgctgccgaacaaggactgggtacttgttgggtttgtaattttgacactccgcgatgcagtgaggttttgggattgcctgaaaatttggaaccggccgtcttgattccggtcggttatgcggaggatgaacccacagaaaagaagcggaaaccattaaatgaaatccttctttaaaaaatcacaaaaacacctttcggagtgccatcgggcaggcagatttaatttccttttacagtggacgaaggtactattaatctcttggcctgatgactgttccggattttaagctcattctttttagtctcttcttattttctgataattttgcatattttgtattccatttatgatagaagtaaagccgaaatggctaaatttgagcactttttaggctttgaataacctatgagtgtagtaagtactattaataacactaaaaattatggagaacataggagttggattgatgttgatggtggtcggtatggcgactgtctttgtcattctcctcatcgttatctatctaagcaagtaccttattactgttgtcaacaaagtggctcccgaagaagctcctaaaaaagcacctgctgtagcacctacggcagatactggtgctatggatgctattaaggcggcagttgagattttgacggcaggtaaaggtcaggtgataaagattgagaagttataatccaaaaaaagaaaaacacatttatcaaaaatggaaagagaagtaaaatttagtctggtctttcgcgatatgtggcagagtgcaggtaagtacgtgcctcgtgtagaccagttggttaaggttgccccggctattattgaaatgggctgtttcgcccgtgtggaaacaaatggtggtggttttgaacaagtaaatttattgtttggtgaaaatccgaatagagctgtgcgcgagtggacgaaacccttccacgaagcaggcatccagacccatatgctggaccgtgcgttgaacggtctccgtatgagtcccgttccggcagatgtccgtaaattattctataaggttaaacatgcgcagggaacggatattacccgtactttctgcggattgaatgacgtccgcaacattatcccctctatcggctatgctcatgaggccggaatgatttcacaatgttcgctctgtatcactttctctccggtacatactgtggaatattatgtgaatatggccaaactgcttatagaagccggagccgatgaaatctgtatcaaagatatggccggcatcggacgtcccgtttcattgggaaagattgttgccggaatcaagaagattaaaaatattcctatacagtatcactctcatgcggggcccggattcaatatggcttctattttggaagtatgccaggctggttgcgactatattgatgtaggtatggaaccattgtcatggggaaccggccatgctgatttgattagtgtgcaagccatgttgaaagatgccggatttaaagtgcccgaaattaatatggaagcgtatatgaaagtgcgttctatgattcaggagtttatggatgatttccttggtttatatatcagtcccaaaaaccgtctgatgaattctttactgattgctccgggattgccgggcggcatgatgggaagtttgatggccgatcttgaaacgaacctggaatctatcaacaagtataaggcaaaacgtaacctgccgtttatgacccaggatgaattgttgatcaagctgttcaatgaagttgcttacgtatggccgcgtgtgggctatcctcctttggtaactccgtttagccagtatgtgaagaaccttgccatgatgaatgtaatggctatggagaaaggtaaggaacgttggggaatgattgccgatgatatttgggatatgattttgggtaaagcaggacgtttaccgggtaaactggcccctgaaattattgaaaaggcagaacgtgaaggccgcaagttctttgatggcaatcctcaggacaattatcccgaccagttggaaaaatatcgtaagatgatgcttgaaaaacaatgggataaaggacaggatgacgaagaactgtttgagtatgccatgcatccggcccagtatgaagcttataagagtggaaaggcgaaagaagacttcttggcagatgtgaagaaacgtcgtgaggagaaggcgaatgccactactcctgtcgaagctgaaaacaaaacaaaagtactgacagtggatgtgaacggacaaccttatcgtgttacagtggcatatggtgctgtagatcctgctacgctgacagctgcttcgggtgcagttcctgcacaaactgctcctgctccggtaggtgaagggaaagatgtgctttctccgttggaaggtaaattcttcttggtaaagaatgctcaggaaaccccgaagaaggtgggtgaaaaggttaataaaggtgatgtgatttgttacgtcgaagcaatgaagacctataatgcgatccgtgcggaatatgacggtactataactgctatttgcgctaattcgggtgacacggtttcagaggatgacgtattaatgaaaatagtataatggaagatatatttgaaagactttatgatatgactgctttcagcaatattattgctgagccgcaattcttgataatgtatgccattgcgttcatcttactttacttgggtatcaagaaaaagtacgaaccactgctgctgattccgatagctttcggagtgttgctggctaactttcccggtggtgagatgggggttgtccaggccgatgagaatggcatggtaatggtgaatggagcactgaagaacatctgggaaatgccgttgcacgaaattgcgcacgacttgggcctgatgaactttatctattacatgttgattaagaccggttttcttccgcctattatttttatgggggtaggtgctttgacagactttggtccgatgttgcgtaatctgcggctttctattttcggagcagctgcacagttgggtattttcactgtattgctggtagctatcttgatggggttcactccgaaagaagcggcttcattggggattattggtggagcagacggtcctaccgctatctttaccactattaaactggctccccatttgctagggccgattgccattgccgcttattcgtatatggctctggtacccgttatcattccgttggttgtgaaaatctggtgtacgaagaaagaattgagtatcaatatgaaggaacaggaaaagaaatatccttcttcggtagaaatcaagaatcttcgtgtgctgaagattgtatttccgattgtagtgactacggtggtcgctctgtttgtgccaagtgcagtgcctttgattggtatgttgatgtttggtaacttgattaaggaaataggtagtgatacttcacgtttgtttgatgcagcttcaaatagtatcatgaatgcggcaactatcttcttggggttgtcagtcggtgcgacaatgactacggaggcatttttgaactggactactatcggcattgtggtaggtggtttcttggcgtttgccttgtctatttccggtggtatcttgtttgtgaagttgatgaatcttttcaccaaaaagaaaatcaatccactgattggtgctacaggtttgagtgctgtgcccatggccagccgtgtggctaatgaaattgctttgaagtatgactccaaaaatcatgtgcttcaatattgtatggcaagtaacatttcaggagttatcggttctgccgtggctgccggtgtgctgatttcattcctacaataaaatacattgtatttaaattattcggacacgaattatacggaaattacaggtgttttagacaatactgtaaaatctgtatagttcgtgttttttattcattctctttctgtatcgttctcctagctaaaacaaatagaataggccctctcctcacgaagaaagcctatcatccgattaatgtttaatataagagagagttttatagtcctaacagttcattgaacttctctgctgtcttgggatctgacggacgtgtcatattagcagagatgatgttaccatcccgatccagcaggataaaacggggaatgccgttaatgaggtaagcatccataaaggtcctgtctgttcccatgtgtaactggatccctttcaactgctcctttgttaccatgttctcccatgcctttttgttcttgtcgcatgacaggctgacaaaatgaatatcctttcctgcatatttctcttccagttcctttaacgcgggaagttctccacggcaaggaccacaccaggtagcccacacgtcaatatagatatattttcctttcaagtcagtcattgaaaccgtctttccatttatatccggataggagaagctagctgctgagggattgcctgatcttaatttttcccacttggtacaaagtgcgttgaatttttctatggactttgtatccttcacgtgtttgcggaataggacaatcagtccgtctgcttcatccagtccgttattgtctacaaagttataaacaaattggtcaatcagaaattctgcaaccttttcatcctgtatggttgcatctatgtagtttacacattgttctgttgaacttgatgcaaccgtttttcctttattactaaaggcgctgatagcatcgggaaggaaagccttatattctttcagcgctaataaaccggcattgatcggagtaatagcttccagtttctcataatatgctttggaaggaatatagttgtcatcctttccaaaatgaggatgatacaaagcgtatttggagaaataataatacgtatagaattgcagacgtattttttcctgtgcagtgaaatcggctggaagttttgcggcttccaatacttggcaattgactgcatacaggctgtctcctttgtgtataagggcggcttcctgcattttcatgtcgggcatgccgagtgatcggagctctttgcttcccagataggtgttgatagcggcgcctgctccttcaaaggttgtgtttctccacatgttatcactgtcgaatgacaaagtaaggtcttgattagggtccaaataaagggtacggcgtccgcgtgtgtattgcatggttacatattgcggagtgaatcccgtgatttctatgttgccgtttcctgcggcgtcaatcgctacttctttttgttcgccactttggctgaaagtcaatataactttgaccttctcattgggattggtgaccttaaaagtgagctttgcagcttccgcagcagtgaaggtactcagcgcaaggccaagtaccaggatggattttagagttctcatcttatttttttcttttaggtttcattttcaatgcatcgggacgcatgttatagactttctttccgtatgcgggttctgtgctgaggctggcagggatgggggctttgccgttcagtttacgaagcaccatttccaaggcggctgcatattcctgatggatgaaagcatcatctctgtctgtttggttataagcaatgtattgcagatagcctacacatttgttgaaccagaattcgggaagttcctctgccttgtatcccaaacgggcgataaatttcaatctgccgatcaactcttgttggttgattgtggtatctgcaatcatcgcatcaatctgggtagctgccgcttcatacttttgttcccggatgtcgttattgatacgaatcattttcagattaaaatcttttccttcatagttgcataaggcttcaatttccgccaattcgccgtatgaagtttcttttgccagtttggcatcaacattttttttaccgaaacgctgacagaaatctgcataattgtctgatacttgctttaggtacgggttcatgccgttgatggtgtttacatatacttcccatacatccggatcagtcagtttggcgcctccttttattaattcgtcaaaagcggtctgtacgttcttgcgtgcatagactgaatagtgataattgatgtaatcaattaaaaaagcacgctccctgtttcctttggtatattggtcttgcaggtaaaaagaacgtttggtaggaacggttgcgtcttttcctgtctgaataaactgttcgggagtctgacgactgctgctgtgatggacgatttcttcggtagcaggatctatgaatgcataggtgggataactgcgtacaccgtatttcttggctaatgtaattccttcaccttcttcagcatcaattttgaggttgatgaaagtttggttatagtagtaacccactgtaggcaatgagaatacggtttgtgccatattcaggcaaggtccgcaccattgggtatagaaatcaatgaatatcagtttattttctgctttggccttggctacggcttctgtccaagtagtgccgtgcaggaaattgattcctgcattctgggcacttaagtgaatcgcatagatacatgcgaaaatgagtaagatatattttttcatgtctttgaatttaatatgttaataaccggggttttgtttacattccagattagaactgatttctgacgacggaatggcatcaatacggcggtctatgatgcgttggtaataattgtctccttgtgcttccgatttctcatattctttttccaaagcttctcttaacgtcttgttcaaggcaagcagatgggtgaaatcgggtttctctgtgtatcctgcaaaacggatcatggcaaaccattcatgccagttctcgaaagacagttccagcatccattcgttgaatatggccgtttccagttcttcattattggctggaagaataatttcagctcctgctctttcgcgtagtttacggatcggtgcgtaggcttcggatatagaggctcccgaacgatacaaggcttcggctttaatcagataaagttcagaaacacggctgaagatgacaggcatgtcattggcatcattcagcagctttttcactgatttcaaattataagctacagcagaactgcgactgtccatcaaactgtctactttagagaagatggcatcggcgcgaggatcatctcccaccagttccacatactcattggtgggcccccaatagccttgtttcttcgtggggctgttaccataacattgctggcgggtggaagtgttggttgcatctttttggtcgaatacacgagcgaacagaatctctttggttgttgaaaacttatcaaaaacgtcaccgtagtttgcttccggcaatggagcatttgtatcaatcgcatcattgactgctgctaccgcttctgtgtattttcctgcatacagcaatactcttgcctttaatgccttggctgcttctttagaagcttgtgaaagctttttccaatcaggagctttttcaatcgctatttccagttgatccagaatatattgataagaatcggctacggagctacgcgccttcaaagcattggatacggatggagcttcattacgcatgaccaccccgtattcactgttcatatcccaaaattcgcagtaacgaaccaagacgttgaagtaggccagagcacgtaaataggctatttcacctaacacttcggctctacggtttcctgagaactctccgtcactcatacggttacaggctgtttccaggaagttggcatttttgattacagcgtaatctgcgtcccattccgttgcatcactgaatgatagggtaggcaacattcgctcggagtagtaaacggcattaccggcgcttacaatttcttgacgccacatggttccggctttgaatgaaccacttactgtaggaaatatgacattgaacccattcccgggcaaggagtaatagattccgtttaaagctaactctacagcagcgggtgttgtgatggcgccgtctaaatctgcttcgaattcgggcttttggtccaagacatctaccaactggcacgaggaaacgcccattgtaagtaaagctaagaatatatattttttcattcgattatacatttaaatgattataagttaatttttaaacctgccgagaaagagcggaaacccggataagccgaggtttcatagttaccgccgtaattactgttactgtttacggtagcagggtctgttcccggataagaggtgatcgtgaacaaattggtagccgagataaatagttgtcctttaattactttgtttaaaggtaaattataagtcagacgcacttcctgcaaacggaagaaggaggcatcaaacaattcatgatcggtgagtctaggtacaccgtcacctatatacaaggccgggtatttggcatctttgttggtgtcagaccatctgtcattcaatccatagtcaatcaaaccggttaattgtccgggtagattctgcaatgtcttgttatagatcttcaagccaccaatctgatatccgaagttggcgaacaaactaaattgtttataagataaattagcagtcaaaccgccgaacaaatccggatcaggattaccgataataacacggtcattgtagttgatgattccatccccgttcaggtctttgatttccaaatgtcctggttttaaggaattcccatcgtaataactttgtccctttgatttagcataggcgttcaattcatctattctggcctggtcttgtatgataccggcatattcataaccatggaaagctcccattggataacctacagccaatacttggtcggcatagctgccttgaaccactacatccatagctgattgtgctttaccttcttcaaccagtctggtgactttattcttgttatgtgacatattcaaggtcaaatccaaactccagtctttagtagataatacacggcccaccaggtttatttcaataccgcggttggtcagtgctccgatgttacggttcatctgcatggagccgccggttgcgctgggtgggaaatcaaatgaccagatcaagtctttggtatctttgatatagccggagatagaaccggtcagtcggtaatcgaacaatgcgaaatcaagacctaaatcatattgggtcgatttttcccaacggatgtcgcggttacccacttgtttgtgtataatggctgatagattgttatagctggttgcttcgtataaatcacgattagagaagctggttaagttttgggtaccggtagtacctacactggcacgtaatttcaaatcattaatgaatgtcaggtttttcatgaagttttcctgagagatacgccacgcaatggctcccgaagggaagaaaccataacggttgttcgaaccaaacatggatgaaccatcataacgtcctgtaaaagtaaacaggtagcgctccattaatttataattgatacgggcaaatgaagagaacaaaccacttgcattatatccgttgccccaagatgagatgcttgcagcacttcccagattggtgtagatgtcattatccggataagtttggccgttcatggtggtgctacggctgatgccgcgttcaaaggagacaccggctacggcatccagtacatggttcttgttgaactcatagttataattcaatgtattgtcgaatacggtttttgaatatttataatgatattcagatccgctagcttcatttctagtacttagaaaacttggactaaatgaattgttttcagtaaattgtaaattacctgataagctggaacggaagcggaatcctttccagatatcaacttctccatatacggttcccatgatacggtaaatattattatggttcttcttataggtgttagctaccggattggcactgccacttgataaatcaaattcaccattgtcattgtatataggaaggtcaggacggaaaccttgtgcactaaatagtgaagtgtttgcattatcttggtctgtatagctcatattggcattaataccaaaacggaggataggcagcacattcatttctgtagacacacgtgcgttataccggctcaggtcacctcctttgaccataccttgctgatcgaatactgataatgaaataaggtatttggatactttactgcctccgcttacagtcaagtcggcattatggcggatggcagtttgtttcacttcgtcaaaccagttggtattagcactacctaatgcagtggaattaggctcaagaatttctaatgcatattggttggacggatcatataccaaggtttctttagcgaagcggcgtactgtttcgcgccattcgtcaccatataaaatacggaaattcttgatctggacatcagtggttacattataattgaagttgacggtgggtttggaaccttctactccttttttggtggtaacgataactacaccatttgcagcacgagaaccatagatagcagccgcagaagcatctttcagtacgtccatagactgaatgtcattgggcgaaattgcatccagcatactgggatcttctacaggaactccatcgatcacatacaagggttcattggaaccggtcaatgaggtagcaccacgcacacgcacgcggactgtttcgcccggtacaccggtattttgtgatacctgtacaccagcggccaagttttgaagcatggaagttacattaggagtatttaattgacttaattgttttaaccctactgaagccacagaaccggtcaaatcttttacagaagaagtaccataacctactacgaccacttcatccagattggttacttcgctttccatttttatattgaagacatgtctgttaccaattttctccttaaccgtctgcataccgataaagctgatcatcagttcgtcgtttttagtattttcgggataagacaacatgaactgcccatccatattggctacagtaccgaaagttgtaccttggatgacaatagaagctccaatgaccggttcacccgtatcatctttgataactccggtaatcgttctgcgtttggcatttctgtcaatcggtaatattaacacataattgttttctaccaactcataacgcatacctgcctggctacaaatcactgaaagtgcttgctccagaggttctttgtttaatgttagtttcaaaggtacattgtttaaagttgcatcttcgtacatgatattaatgccggtttgctttttgaccatgttaagggcctctttcacactgatgttttcacttttgatagtgactgtcttgtcagctgatacatttgcaaacacagcgttgaatgtgcagaatatgcacattagcattactaaaaacctcatttttggaggtttagctactaaacgcttccaaagctcgtttcttttcataaaactcaaataacttatttaataatttagaatgttcctgttatacagggcttgattattgtttttttactaatatggtttctccctttttctcaaacttgacatcggatacacgatgaatgatgtctagtgcaaagtccaaaggcttgttacggaaaataactccagtgaatttcatggtttctaattccttggatgctatttgaatatctacattatagcatcgggacagacgggctatcagcaaaggaaatggcattgcgtcaaactccatagcaccctcagtccatgaaatatagaattcagtatctactttggaaacttttgattgtgcagaagagtaatgttcgcctggtagtagataatattcacctgatggagcatttacctttaattttccttcaattaaggttactgataattcttcatcgggataagccgagatattgaaagttgttcctaatacataaatagcatggtcgtgtgtttttattatgaaagggcgggcttcatcgtgtgttacctcaaacatggcctctccttccaaagtgacttctcgggtatctccgaattgaaccggaaaatcaatatgagagtccgcattcatttttacttttgtgccatcagctaatactattgcgtactccgaaccttttggcactataattttattctgtaataattcagtatccagtttgggtttgtggggggaatcactttcttgaggaaatatgatttctccattgttgatatgacttccattgatttcccgttggttttcatagaggggaactacagaatggtttgcttgtacccaggtggctttaggagtttctgtgtttttgggaagaggggattgttgtggctgttcgttttgggcaatggcaggtactggcttctgaccattgaaatataaaatggaggtaattcctattagtattgctattgcagcggccgaggaataaatagcgatacggcgatgaatagtatgggaccggttacaacggtgttgaatagacttccatgaggcttctttatcaaactgatgtaataagttaagttggttgtttacatggtggagtgaaagtaacttcacaaagatttctctatgcgatgcgtcttcttcaatccatagctttaattcttccaattcctgctcgttaagctgatgggacaggtatttttgaattagtgtttccgttttactcttttgcataattgttgtacagtttaacagaagtatcacaaatacgcaaaatgggtgacaaaaatctgaataaatttataaattaaataagattagaatttctatcatattgaaacgacgcaacatttttagtgcgcgtgatagatgggtttttactgtatttacggaaatatggagctcttcagctacttctttgtactttttatcttccagaacaattttgactagaacattgtactcttgttctggcaatttttttaattcagtcagtagctggtttcttttttgcaatagttcttcctcatcataaaagtcatcgataggagaataagattcttcttccatttcgtctaaagaaaagtaacgttctcgctgcacttttgtcagtgaagagaaacggacggcattgaacaaccatgcgtgcagattggaggaaatggtggtatgtgagtttttgtcccaaaaactgacaaatagattctgtacaatatcttctgaagtttccgtagagcctgtgaattgtacagagtagaggcataaagggagataataagtatcatacagtagacgaaaggccttttctttgttttcagcaaagagagctagtatcctttcgtctacttcattatatctattgtattttcttgcattattgttcatggatgccttttgcggcacaaaattaggaatttaaccgacacgatatacgactttcaccgattaaaaatgcaaaaagtacaatgtattatgaatattttctttatttttcaattctgaaccagtcagcgtctgtccatcctccgtcattggttacaatagcggggcgcgtacagaagatacctaccttggctcctatccatttaccttcttttacttggaaagtttctcctaatggctggaatttcttgccgtccgtactgtaactgaggttacatttcactaataagtcgtgaccgccttcactggctttaatcttgtctccttttgcagaaaatttagcgcgaagatagattgtgccgccttttaagggaacggaagcatttactttttcagtagccccccgatcggctttcaggcactccacttgtgacaggacaagtccgttgtctgtgttttcaacaactaatccggcataatccattcccattacaaccagtcccgtacgttcacctttatatttttctgtcggcttgaaagtaagcttggtggtggcagtaaaattgggagccggggttttttgtagcatcagattagaaacattccataaacttttataatcttcgggaactgggtaggagtatagacgtacaaatccttctcctccgttgaaataagcccatttttcattgatgttagcctgccattgccattgaggagacaatgtataaccatcaaactcgtcactttcttgcggggtacaaataggatagttcttacctacattaggctttttataagtcagaacaggttcaccacaaccatcgccgtctttatcaacacctataacgggccagtcatcaacccatttcataggttgcaggtggactaagcgtccgtaagctcctacgtcttggaagtgcatgaaccagtcttctcctgtaggggtgtctacccaaccgccttgatgaggcccgttgacgggagagttgccttgcgctaatactgttttccattcgtatggaccgtatacgttttttgagcgaagtacgacttgccatcctgtaggaacgccgcctgccggatggaagatgtaatagtatccattacgtttatagaatttgggcccttcacaagtttgatgtgcttcatgaccatcgaaaatgatacgggattgtgtgatagctttacttgcatcagcacttagctcacaaattgtaattacacttttcagtccggctcggcttcctgcataagcgtgaaccagatatacacgaccgtcatcatcccataatggggtcgtgtcgatgatgccctttccagctttcaccaaaactggctcgctccagggacctttcggatctttggctttcaccatgaatactccttggtccgggtcaccccagaatatatagaattcaccgttatggtgacggatactgggtgcccatacacggttgccatgttcaggacggacatcggtaacagggggcagtgcgtagggtacagccgcacctatgatagtccagttgacaaggtctttggagtgtaatatttgtaaaccgggcagacagttgaaactggatgaggtcaaataataatcgtttcctacacggcaaatgtccggatcggagtaatccgcatacaggactggatttttgtaggttccattgccttgatcggccacccaggcttgggatacataattctgtgcgggaacagataaaaaacagcttcctagcagacagagagtgattagtcgtttcatggttttagattttttatttaatcgtaattttgcaaggatgttccaattcttttctccattggggaagataattgaaccagtctttcatatctttaaatccgaaactttctttttttgaggtgaaagtaacgtaatagtggaaatgctgttgccccggtgcttgtaaggtatataagtagtttgatccgtcttgtacttctttaccgatatatttaggaatgaaagttcccatacctgttgtttccttcacatagcctatggtgtctgtgacaggccagtcggttccccagcttccagtcagtcctttatggtcgctcatgtgacctccttctttcagaatctgtacacctgctgcaaagacttcctgtttaagcggacggtcaaacaggacatctaccttcatgtcccgatgaccgccatagatggtatatcgattgatcatgttcaaatcgtttccttgatattcccaaccgatgacttctgcttcgacgatggcacgtacaggtccggaggctagtacacgttccgtgcggtttactactggttttatgtgggtcgcttcagtaccattccaaccttttaatgcacctacaccaccactattgtaaacacgtagcgcatcatctccgtagccgttggcacgttgcgctttggtagggtagaaacaagtctcttttatttccagtcttttatttactttgctatatggatctaccgtctgtttttcgttgaaatagatacgataggcaactaattcactctctatagccggtccgtgatggtaaacaaaactatatacattctcggttcctgccgctgaaaatcccgtaatattggcgaatttgttgttatgtccgtaagctttcatttgggcataagtacgtgccggatagtttttttcacttttttctgaagagagaattacacggaaacttttattgcttttggctggcatatcgataaggaaagccagttcgtcagcacgtgcgtcaccgttcagatcgtctagttgggacggaatttctttattaccttcccatacagtggcggatttgatgttgaaacctgctttcaggttatttaaatctatcactaccggttcatcggtcttattttgagtccattcattactgacttctacggtcagtgtcttttcgcctttttgtgcaaaagagttggtaaagcatcctgctaataatgtgaggacaataattgagcgctttttcataatgatgtatagtttattattttaagcacggatcatacggattacacagtgttagtatgaaaaccgtgtttatccgtgcaatccgtgctttactatttttataaattaagtggagaaatgcactaatgggtgtaagaattagaagttgagttcttctccttgtgccccgatttcagcatgattctttccgtctatcattacattggaaacattttgcatcttcaagttctttccactttttaataactctattttgatatttttcatattaacttcgtcggcttcgcttaatactacaccttctttagcattagatacgatgatattctccatattgatattcttgattctcatctcaggcaagccattgaagaacacagccctgcctgctccgttacaggttacatctttgataaagatattacggaatatcggagtttcttctgttacaggagggatggtagtttctgctttcttttcatcctgattagggtcttcaccacgaccttttccaccatagtataaattgaatattaatgcttcgttcggaatattaatcatgttgatattgctgatgtagatattctctaccaatccgccacgcccacgattacttttaaagcgtaagccaacatctgtacccatgaaagtacaattgtctacatatatgttgtttacgcctcctgacatctcactacctacaacaaaacctccatgtccatgtaatacggtgttgttcataacgatgacattttgacaaggttcaccgcgtttgcgcccttgttcgtcctttcctgactttatacagataccatcatctcctgcatcaaatgagttgttgataatcaatgctttattacatgattccaaatcaagagcatctccgttttgtgagtaccaaggattagaaactgtaactttattaattgtaatattttcacatgatagcggatgtaagcaccaactaggtgaatttttgaatgtcgctccttccagcaataccttattacatttgatgaaacttagcaatacaggacgtaaccaatcgcgcatgtagtcccagtcagaatcggtaagttctccacgaggtacattgaagttgtcttttgataggatagcacctttcaatgcaccttcactgggataccagattcttccgtcggcatctactacaccaccagaggcgatcaattttttccattgaccttcagtcagtttatctttcttggtcggacgccatgtgtctccattaccatcaaatactccgtgacctgtaatcgctatattttcagcattacgtgctgaaataggagactggcaacgacgggtttccaaaccttcaaaagacgtgtttataatgggatatagtgaatggtctgcactgaataatactaatgcattcttttctgtatatagattcacattgctcaatagttcgatgggaccggtcaaccacaagccttcagggataatgactttaccaccgcctttggcattaacctgttggattgcatcattaatagcctttgtgtttaaagtaataccgtctggtttggcaccgaaatctatgatgtttaccgaatagtctgggaaagtaggttgttcaactttatccatcttgaaagggagacttgtatagatggcgggatctatgatatcttctacaatagtcgtagacggacaattattacatccggtcaaaagggggattaaacatgtggcaggaagtaatagaatcttctttattaaagtagtcattggtattatatatgtttaagattaataattatctagttgattgttgctttaagaagtcttatcactctcccgtaaaagaccctcacgggctatttacgggagtagcaataatgtttcatgttaacctaattctaaccttaaataaatattatgaaaaaacctcttaattcgatggcaaatataactgaaagaattgtcctttatgtgcactatttgatagaataagtggattttttgttaaattctcatttagctgaaaccttaaatggtaaaaattagttttataattgcattatttcttcatttgtgtgcaaaaaaagctatgattaatttatttgtttgtatctttgcaaactaatttaacaataaagaaggtatgagttacaatttgttgaaaggaaaaagaggtattatttttggtgcattgaacgaacagtctatcgcatggaaagttgctgaaaaggctgtagaagaaggtgcgtccattacattgtccaatactccggtagctgtccgcatgggagaagtttctgctttagctgagaaactgaattgtgaggtaattccagcagatgcaactagcgttgaagatttggagaatgttttcaaacgttcgatggaaatattaggtggaaaaatagatttcgttcttcattctatcggtatgtctcctaacgttcgtaagaaacgtacttatgatgacctcgattatgatatgttgagcaagactttggatatatctgccgtttcgttccacaaaatgattcaagctgctaaaaagctggatgctattgcagagtatggttcaattctggcattgagttatgttgctgcgcaacgtacattctatggatataatgatatggcggatgcaaaagcattgcttgaatctatcgcgcgcagttttggttacatttatggtcgtgaacatcatgtgcgtgtgaataccatatctcagtcgccgactatgactactgccggctcaggtgtgaaaggtatggataaactgtttgattttgctaaccgtatgtcaccattaggcaatgcttcggcagacgaatgtgcagattactgtattgtaatgttctctgacctgactcgcaaagtgactatgcagaatttatatcacgatggaggcttctccagtgtaggtatgagtttgcgtgccatggcaacttatgaaaaaggtttggacgaatataaagacgaaaacggaaatatcatttacggataagaaatagatgatacgcaaaattatattcatattagtgggatgtcttgttgctctttcctcctgtcaatgggatgggaagagtggcaatactgctgatgtggatgtaagagttgcccgttatgatcgtttgcagtatgagtatgttacgatgaatagtttctcggcactgcaaaaaatgaatacggactatcctcaggttaccaagctgttgatagaagatgtattggcgataggtgaggtggatgacatgaagattaacgaccggatgttggaatattattcggattctaccttattgactttgatgcacgatgccgaagagaaatttaaggatcttagttgggttgaggaaaaactgactaaaggtttcaaacgtttgaagaaagaggttcctgcattgtttgtacctcatttttatgctcaaatagctgcgctgaatcagtcggttgtagttggggatagtattttgggctttagtattgataagtatatgggggcggattatcctttatataaacgcttctattatgactatcaatgtcgcagtatggagcctgatcgtattgttccggattgttttaccttttatttgctgagtcagtatcctttgccatggcagcctggtcgtactttattagatatgattatgcatcgtggaaagataaattggatagtggctcatattttagggtatgaatcttttgagaaagagatgggatatagtgaggatgaggctgagtggtgcaggaagaacaaaataagtctgtggaagacaatggttgaaaatggtcatttatatgctaccgatcctcttgttgtacgtacttatatacgcaaggatccctttatttctattatgggtgagaaaactcctgcaagcattggagtatggatggggattttgctgattgatgaatatatgaaaaagcatcctgatatgacaataaaggatttgttggctaaaacagattatcatcagatgttagctgaaacagatttcaaaccttgatattttgactgattagtagtatgatggaagttgctttgtatctattgcctgtcacattgggcgaaactcctgtggaaaatgtgttacctgtgtataataaagaggtcattctcggcatcaaacattttattgtagaagatgtacgctcggcacgtcgctttttgaaaaaggtagatcgtgggattgacatagatgcattgactttttatccattgaacaaacatacttctcctgaagatatttccggttatctgaaacctttgttagccggacagtccatgggagttatttctgaagccggttgtccggctgttgccgatcctggagcggatgtggttgctattgctcagcgtaagaatcttaaagtggtgcctttggtaggaccttcctctattattatgtctgttatggggtcgggttttaatggacaaagttttgcttttcatggttatttgcctattgagtctggtgagcgtgcaaaacgtattaaggtattggagcagcgtgtttatgcagaagatcagacgcagctttttattgaaactccttatcgtaataataagatggtggaagatattcttaagaattgccgtccgcaaaccaaactttgtattgctgccaatattacgtgtgaaggagaatatatcaagactaagacaataaaggagtggcaggggaaattgccggacttatcgaagattccctgcatattcttgatttataagtagtgcgataacaggtattcatttaaattcctcccacatttgtgccactatgttcagatgatctacttcttcttttagaaaagaactatattgggcagaattcatttctatttcttcgggagtaacaaatttccctccagtaaaatgtatctgttcttcgtcatttaaaggaagaatatatagcatgatggttttttttactccattggtttcttttaccaaatgtttcagactgaagcgtggctccggttgtccggtaatatggttgctatatttattttctacttctttggcatatttatccgtatctgtcttgcaggcataaatgtagtcttccataggtatgtccaacttgccgggttcttcaccttgataactgcggggggcaacataaatctttccattgcaaataggggcgatacgtaagaaaggcatttttttataagttaaactgattgttttcacaaaagcatgattgacaataatgcaaatgacatatatcaaaggagggatgatgtgggtcatagcgtaaagggtattataagaaagtggactgaaaaataaataaattatacaggaagcaaacaagtgaatgccggataaaacagctataacctgtgtggcccaacagttcagaatagatatcttataatgaaagtaggagaatagttttgcataaaaattggggaccatgaggtagagtagtgaaaaacagagtatcagtatttctaacgtaatgggaactgttcggtccggaataagcatatctccgcttataccttttatgatggatgcaatgattaatgccaaagttccatgtagtaatactaggtttggctgataaacaggaggtttgacaagtctgtataggatataaataatgctagccaaactacagacatacaaaacagctgcatcttgaaagaaaatgcagaaaatcatacatacgatggttggaattaaccctgtagacatgattaaattcttgtattccagtaacgatttcattctctctatctctatttatatctttataacaaaaaagatataaagttggtttactcgttaccctttaaattttatatgtttttctgcatgataggaggaacgtaccaaaggtgcgctttccacttctcggaatcctttctttaatccaattgttctatactgtttgaattgatcgggggtaatatattccgctaccggataatggcggtgggtgggttgtagatattggccaatagtaagtatcttgcaaccttgtgccaataaatcgtccatgacttcttccacttcttccggccgttctcccaaacctaccataataccggatttagctgtaataccattattggctatttgttcgatgacctttaaactggttgcatagttggctgcacttcgtaccaagggactgatgcggcgtacggtttccatattgtgtgaaatgatgtctggtttggcgtcaatgactagctgaatcagttcgcttcttccttgaaaatcaggaattaaaacttcggacgtggtttccggattcaatcgtttgatttctgaaatcgttttagcccaatgggcagcacccaaatcatttagatcatcacggtctacagaagtaataacggcatgggataatttcatgagttgaatggactctgctacatgggtcggttcttcagggtctaacggaagaggtcgtccggtctgtgtgttgcaaaatttgcaggaacgggtacaaatttcgccacctatcataaaagtggcagtaccttttccccagcattctcccatattgggacatcgtccgctactacaaatggtatgtagtttatgagaatctacaatatgtttggtctcggtatatcgagcgtttgcccctatgtttattttaagccagtctggttttttaacatgattcatgatgatattagatttataatttaccacagattataccaatgtaaattgttctcattcggtttttatgtaaaactgtataatctgtgatgaatggtttttattttaaattatcaataaagaaattggctacgcgagtcagtaaatgtctagttgtgttgcctccactgattccatggttgcggttggtatagatttgcatgtcaaattgcttgtcggcctgtaccaatgcttcactatattctgcgttgttacgtaagtgtacattatcatctgctgtgccgtggatcagcaacaattcaccgttcagtttgttggcacggttaatagcagatgcagcattgtaaccttccatgttttctttgggggtacgcatgaagcgctctgtatataccgaatcgtagaaacgccagtctgtaggagctgcaacagcgactcctgctttgaatatcggtgttccttcactcatggacattaatgtattgtaacctccatagctccatccccatataccgatacggttaccatccacgtaaggtagtgtacttaagtatttggcggcttctacttgatctttcgattcttttactcctaagttcaagtaggtacatttttcaaaatcagaaccccggccaccagttccgcgtccgtctacacaagccatgatgaaaccttgaccggccatataagcttcgaacatgccgccatctctacgggctccaattccccatttgtctgcaacttcttgtgaacccggtccactgtattggtgcatgataacaggatattttttgtttggattgaaatttgcgggtttcattatccaaccattcaattctacaccgtcattggtcttgaaactaaatagttctttacttggcatattcagacgtgaaacttggtgtttcaatttgttattatctactaaggttgccaactctttaccattattgtcattaagggtaatgacaggaggggtgttgatattagagaaagtattgatgtaatacttcatattgttactgaaaatagctttatgagttccttcctgcttggacagtttggtctttttacctttgccatccactttgtagatagcggtgcgtagcggactgccttcattgctctcaaaatagaatgtgttggtagcttcatcccatcccaggaaatctttcacttcgaagtttccttttgtgagttgcttaaccaggtttcctccgctagtgtaaagatagagatggttataaccgtctttttcactcatcactacaaaattttttggatagaaaacgatgttggagtatgcttcttctttaatgtattggggagcttcatcacgtaccatcagtttacacaatgtacttcgtggattggcaaaatagaggtcgaaacggttttgatgacggttcaaagtcatgattgccaacgcattctcatcatccgtaaacttgatgcgagggatataaccgtctgcgtctagaggcaagtccatcttgcgggttaccttactttttatatcaaaagtatgaacggttactttggagttgtcaattcctggcatagggtatttgtattcatattctcccggataagtgctgaatttctctaatgcgggaaccatacctttgtatagtggaaaagaatacataggtacttgactctcatcaaaacggatataggcaagcatctggctgtctgcactgaagtcgaaagcacggttgaaaccgaattcctcctcatatacccagtcgggaataccatttagtacttcgttgaatttgccgtctttggttacttgtgattcactgttgccaaacaataattttaccagatagatgttattatcacgtacaaaagctatctgattgccatccggtgagaataaaggaacctgttgtgggccgttttctgagagcggttccattttattgttttttacgttgaaaatataataattggcagtaaacgaacgacgataaatcggtttggtatcagtctgtattagaatcagtttctcatcgggtgacatgatatagtcatcaaatgacttgatgctacagtcacgggccgtatttacatcgaagatggtacctgtttctttgccggtcttgaaagaatactgcatgatttttttgccatcagtactcatttgggtgtaatgttctccatccaacatcggtttgatacctctgattccttcggcacgatacgttctgtttgctacgtcttgcaagcttacttgttgggctccgactgtcagcaggcagaagaataaaataataaatatgcttaattttctcataatagataaattctttaaatgataatcaaagacaaaggtaaaacttttgtttgaaaatacgtatctttgtcccgcaaaataagttcatgaacagagagatgctttataacgacttatccggctttttagccatgcactttccttgcaaagtgcagaagatttctattaatgccggatttacttgtcctaaccgtgacggctcggtaggatacggaggttgcacttattgtaataatcaaacatttaatccggcctattgccatacgggaaagtctgttactcagcagttggaagaaggaaagcggttctttgtacgtaaatacccggaaatgaaatatctggcctattttcaggcttataccaatacgtatggggaactggaagagttgaaaagaaaatacgaagaggcgctgatggtagaggatgtggtagggctggtgatagggactcgtccggactgtatgccgatatcattactggattatttggaagagcttggtaaacacatttttgtattagtggagtatggcattgaaagtacggatgatgaaacgttgcgcaggataaaccggggacatacttttgccgtttctgcagaggctgttcggaagactgcagagagagggattttggtaggagggcatataatccttggtttgcccggagaaaaaagagaaatgttaatcggacaggccggagtactttcacaattacctctgactactttaaagctgcatcagttacaacttattaaaggtacgcgtatggcgagtgaatatgtgaaagatcctgaagctttccatctttatacagctgatgaatatgttgatttagtcattgattatatagaacatcttcgtccggacatcgtactggagcgttttgtttcccaatcacccaaagaattgttgatagctcctgattggggattgaaaaattatgaatttacgaataaggtgaaaaagcggatgagagaaaaagatgcctggcaaggcaaatactataaatattaaaagaaggaaacagatatggaaatcaaaggaaaagtacattatgtgggagtgaatgaccgtaacaaggctttgtttgagaacttgtggccgttaccttacggtgtgtcttataactcttatttgattgacgacgagatggtcgccttggtggatacagtagatgtatgctattttgaggtttatttaaagaaaattcgtagtattatcggtgataaacctatcaattatttgattataaatcatatggaaccagaccattccggttctattagtttgatcaagcaatattatcctaacattgtgattgtcggtaataagaagactttcgaaatgattgaaggattttatggtgtaggcggtgagcgttatgtagtgggtgaaggagattttttagctttgggacaccacagactgcgtttttcattgattccaatggttcactggcccgaaacgatggttacttttgatgaaacggaaggtattttgttttccggtgacgctttcggttgttttggtgcattgaatggtggtgtggttgatacaaatattaatacagatatttattggaatgaaatggtgcgctattattctaatattgtaggcaaatatggtgcgccggtacagaaggccttacagaaattgcaaaacttgaaaataacgactgtttgttctactcatggtccggtatggacggaagaaattcctcgcgtggtacgtatttatgaccgtttgagtcgttatgaggctgaagaaggggttgtaatagcttatggctcgatgtatggtaatacagaagaagtggcagaagttattgcagaagaactgagcaagcagggaattcgtaatatcgtgatgcataatgtttctcataccagtcattcttttattattgcggatgtattcaaatataaaggactgattgtgggatgccccacttataatactcagatgtatccggaaatggaagctctgctgagcaagctggcttctcgcgagataaagggacgttatctgggatattttggctcatttacatgggctagcgctgctgtgaagaaaattgcagagtttaatgataagttgaaatttgagcctgtcggaaatcctgtagaaatgaaacatagcatgaaggccgaaactaacactcaggcaaaggagttggctaaggctatggctgatcgtttgaaagcggatagaaaataaatcttgtgatagaacataaatgacgcaaatgacacatgattggtaagatcaagcttgtgacaattgcgtcattcgtgttctaaaaatttctgacgttaggcttgatgtacagtaagctgcgggaatgggaagttaattccttctttattaaaagtagtataaacagtctgattcatactgaaaaatacgttccaataatccgaactattcacccatacgcggatttttatatttacactgctggcagcaagttctcctaattcaataaaagggggcggactggtaagaatacgtttatcattggctatgatttcgcgcaatactttttctactttattatagtcttctccgtagtccacgccaaaattccattctatacggcgggtgtccagtttactgtaatttgtaatgaccccactactcatggctccattaggtacatatatcatcttgttgtctgcagtgataagaatagtatgaaaaatctgtatttcttttactgttcccgaggcaccggtagaagcttcgataaagtcccccactttataaggcctgaacaataagataatcagtcctccggcaaaattttgtaagttaccagacagtgccataccgatggcaacaccggcagaagcgagaagtgcggcgaatcctgtcagttcgatacctaatttccctatcacagcaagaatcagcatgatgagcagtaagatattcaccatactctttaggaatgactggatactcgggtccacttttcttttttccaaaatacgtgcaaaaagtctgttcagccaatttatgaggaactttccgattataaaaataataagtgctcctaatactctttctcctaattgaatgccggagtcgatcagtttctctaatgcattggttaattgaatacttgtttcagatgctaataacatgataaatttactttaatttgacatttctaatatataaaacaattcagattaaaaatcgttcagaatacctttgccttggcgtacaatttctgcttctccgcttgtacagttcacaatggtagaaggttctatgtttccgatacctccgtcaataattagttctacctctttcccgaatttttcttctattagttctggagtggtaatatattctatgtcttcaccatctttcagaggcaacgtggtggtcatgatcggtgcttttagtatatggcatatttctctgatgatgttgttgtcaggtacgcgtatacctacttctttacggttcttgaatattttgggcagacggtttcccgtattcaggataaaagtaaacggtccgggaagatttcgtttcattagcttgaatgtgctgttatctactttggcatattcgctgatattgcttaagtcgtaacagataatggataaattgtttttacgtggatcaatgtttttcagtttgcagatacgttctattgcacgttctttcaggccatgacatcctatggcatacatcgtatcggtagggtaaataattaacccgccctcttccaatatccggattacttcttccagatctttgggattattattcttattataaagtcttaaaagcatgttattttaatttttagaatttttttcacgcaagcgttccgcaatagcccattgtagggcggcttcctcttcttttcctactttcatcaatacgtctccgaaatattcatgggcctttggatgttccggttttaaagaaacagcccggtcaaaatctcccaaagctccttctatattatctagtgctagtctgttttttcctcgattataaatagctttgaataaagcgggactaaggcgtactgcttcattcagacaaacttcggcttcgtaatattccttgtcattatgtaatgtgatacctttacgcacccaagcgtccgtataagaaggattcaattcaatcgctttgtcataattggcaatagcagcacgtgaatcatgtgcttggataatacattcatttcccattaaataatattcgcgggcatatttttcaagatttttacgttgtacatggaattggtcttttagccgtttgttttcgaccttcaaattgttgatgattcccagtttcttacgtataaatcttttaatcaaagatttttcgatgtcataacgtgaatggatggcaagaaagaattgttctagaaatctttcaaaatcacctttgtcgaagtgttgtactgcttctacatattgtacatcagcttgtgcctgcttcaatgctttttcaatggactggcggttgttgaatcgttgagagaactttactatttccggacggacaaagatatctccacgtgtaatttgcttttttagttggatgccgtttagtgaagtacagcggctcaatgctacgtaggcttgtccaccggcaaacacccctcctgtaaaatcaataacgaccctgctgaaagtcaatccttggcttttgtgtatagtgatggcccatgccaaacggataggatattgtataaatactcctaactcttcttcttctatttttttttctagttcattgtacctatatcgtatattgcgccaactgtcttttttaacgtcaaattcctgcccgtcttctgtgataacatataatgtatcctcttcgtctatacctgaaatggtgccaatcgtaccgttcacccaacggcggtcgtaatcgttttttataaaaataatttgtgctcctggttttacttccagttccatttgggtgggaaggctgctttctggaaactctccatgtatctcaccggtcagaatcgttgattctccaggcagttcagataatttcttttcattgataaagtctacggtatctctccgggtagcaagtgtgatatacatatcactttcattttcttctatttgagtgttgtaacgggtgtttagtagttgtaagtcagctgctccggcagtattggtccggatatgatccaatacattaacaaaaactttgtccgactggcggtatacttttgtcagttctatggataccaactccatttcctgaaagactcgtgccgaaaagaaataaggggtgggatagaagcggttgattatctcacgttcgtcatttttaatgactggttcaagctgaaaaatatctcctaccagcaaaatttgtttgcctccgaatggttcacgcatattttgtgaatatacccgcaatattttgtctataaagtcaataatgtctgcccgaaccatggaaatttcatcgatgatcactaattctatttcttttatcagtttgcgatgggcggaagtatatcttagaaagctatgtaactttccatctttcaaactgaatttaggatcatccggcaaaagtggatagaatggtaatttaaaaaaactatgcagtgtgcttccaccggcattgatagctgcgatacctgtgggagccagtactatatgtttctttttggttacttcgcagacatattttagaaaagtagatttacctgtacccgcctttccagtgaggaatactgactgacgtgtatattggataagattcaaggcatcttgaaactctttattatgggtatctacttgcatttgtccatacgtttaaaaatgaatgaacaaagatagtggaaatcccgtaaaagggcataaaaaagacggttaaataaccgtccttttttatagtcctacagggtgttgctctgtattggttctaatttactttgtttcgttcaacataacgtaaccccaaatcataggatcagcgttagcgattttgtgaaaaatgttttttacctttttcataatgttatcctttcttttttaattaatacctaaaaacactcataaatagcaggcatacctcccggttagccttctttaaacaatctttctttttaccttagtagctactaaaaaatatctttttatgttttacaacacaaagataaagcttttgttcgttataatatgtattttgcagcatatttttaatcaatattccaattttattgatttaggtcaacaaagtaggagcttcttgttgcattttggtgaatattttgttcgtttctgccgtataacatataaatcagtttgcttacctcaagaaatattgtttgatttgtgatatcataataatatcaaaataaatcattatggaaacaaaagaaatgtcttacaatgagctggtaatcaatggatttatggctttgttctttaacttggttatgttgcctgcactagtattcctgaactttttgatttttggacaactaccttggttatctattcctgttttatttgtgctggtattgttgtttgtgctgatgcttccgggatatttttctcaagaacctaatgaggcacgtgtaatggtgtttttcggtgaatataaaggcacttttaaaaacacaggcttcttttgggtaaaccctttcatgaacaagaaaaagttgtctcttcgcgcccgtaatctggatgtggagccgataaaggtgaatgataagattggtaatcctattctgatagggctggttttggtttggaaattgaaagatacctataaggcgatgtttgagattgatgcgcagacgatggcggacagtaaagggactgggacggcaagtgttagcgtggcagggcgtatgaatgcttttgaagattttgtacgtgtgcagagtgatgcggctcttcgccaggtggccggacagtatgcttacgatgacaatgagcatgatactaatgaactgaccttgcgtggcggaggtgaagaaattaatgaccagctggaacgtcagcttaatgagcgtctggctatggccggtatggaaatagtagaggccagaatcaattatttggcttatgccccagagattgcagcggtgatgcttcgtcgtcagcaggcaagtgctattattaccgcgcgcgaaaaaatagtggaaggggctgtttctatggttaagatggctttggataaattagccgaggatggaattgtagaactggatgaagaaaagaaagccgctatggtcagtaatttgttggtagtgctttgtgcggacgagccagcacagccggtaattaattccggaacgttgaatcattaatgtaggaaatggcaaagaaagagatgataaaaagctttgtgctcagagtggacgcagaaactatggaagctatcgagaaatgggcggcagatgaattccgttctacgaatggacagcttcaatggattatagcggaagctttgcgcaagagtggcagaatgaagaaaaagaagacaataatcaaaaaagaagaaacagaatgatacagttattttgattgtttatactgttttgggtctgtaaaaagggcatcaatatcgataaaacaaattatttttcttattttcatagggtattttaatcctgggtgatcttataagtagaaacaggattagtatttacttttttaataccttaatgaatatgagagcgcataaaaaacaatttattgaatggacactgctcattgttctttggctgagtgccattccgggatggagccaaaaggaggtaccgtttgctgaagagaatacttatattacagtcagcggtgtagtaaaggacaaacaaaatagaaggactttagagtatgtcaatgtatctgtttcgggcagcagtgtggggacggtgacaaatgcggatggtgaattttctttgaagatagaagatgcggagatggtttttgctttagaaatttcacatatcggttatcataacaatagagtacgtttagataaagaacatttatcggatttaaagatttaccttacccctcatgccaatatgttgaatgagattgtggtttatgcccacaaccctcgttttatagtggaagaggccattcgcaagattcctgtcaattacagtaataaaaacaatatgcttaccggtttttacagggaaactgttcagaaagggcgtcgttatatcaatatttcggaagctattattgatgtttacaagacttcttatgaggatatgacaactactcgagaccgggtacaggttttgaaaggacgtcggctgcttagtcagagagccagtgatacgttgggggtgaaactggctggcggtcctactttatctatctatgtggacattgtgaaaaatcaggatgcgttgttggatgtggaaacgttgaactattatgatttctttatggaagaaccggtacagatagacaatcgtcagcaatatgtgatcagtttccgtccccgtgtcgttttgccttatgccttgtattatggcaaattgtatattgatcgtgacaagttgtcgtttactcgtgcggaatttagcttgtctatggataataaagtcaaggcggtacaggctattcttgccaagaaaccttatggcttacgttttaaaccacaggaactttctttccttgttacctataaagatgtggatgggaaaacctttctgaactatatccgtaaccgtattcggtttaagtgtgattggaagcgcaagcttttctctaccggttatactgtgctttcagagatggtggcaacggatagggaggaaaataatgtggcgataattcccggaaagatggcttttcatcagaaagatgctttttatgataaagtggatgaatattggagcgaggatttctggggctcctataatattattgaacctacggaatcattggaaaatgcagtccataagttaaagaaacaatcgcgttaaggcctcggatgaagtttgcatggttgaaaagaattaccaaaaaagaagtggatgctgaatgatttgttaacactaaccaaaataagggagggagatataaaggcgtttgaagatgtgtttcgccgttattattcccctctctgttggtatgccatgagtatcaccggcagtatggaggctgcggaggaaatcgtagaggagttgttttatggggtttggagagatcgggagaggctgccgttgttccgttctatgaaaagctatctttatgttgcggtgcgcaatcagtcttttcaatattgcgagcatctggaggtgagaaacaaatatcgggagtttgttctctcgcggaaggggcggacacaggatagcagtcctcaagaagagatagaataccaggaattaagacatttgatagatactacgcttgctcggatgccggaacgaaggttgcgcatattccggatgcatcgtatggaaggtaaaaagtatgcggaaatagcttcgcagctttctttgtcggtgaagactgtagaggctgagatgacaaaagctcttaaagcattaaaaaaagaaattgagaattatattataaggacatgagtgaaacaaaaagaaataaggaaagagtggatcgggcatggaataaattgtatgaccgtttggatgctgacggacttttgttatcaggccggcaggataggaaacgtttgtctgcatccatgttgtggaagtggggggctgtggctgctatatgggtcggaatatgtgtctttttgactgttacttatcgaaaagtgggcgaatcggtagaagcccaggctttaattatgcaggagaacacggagcaatctactttggtgaccacactcgaggatggatctattgtctatatgggtggggaaacctctttgcaatatcctgaacatttctctatggacaagcgtgaggttagtttgcagggaaacgctctgtttgatgtgaccggtaaccgggaacgtccttttctgattgaaacagaggaggtcagaattgaggtcttgggaacgatgtttcatgtgaagagtgatgtagggagtactttcgaactgtccgtacagcgtggcaaggtcaaagtggcattgaaaaataaaaatcaagagatgtatgtcaatgcaggtgaagcggtgacgcttaaaacacatcaattgcgtttcactgattatagggacgatacccggatagctcattattggaaaagtatgcgtttcaaagacgaatctttgatgaatatccttagagttattaatatgcattcttccggtttgcagcttaagacttctccctccttaggggagcgtcggcttacggttgcattttccggggaagctccggagtctatggcagagcttatctgtttggctatgaatttaaaatatactcgtgaaggtgatataggtgttttatccgaataaagtgggaagatgaatcatattcgtacatatcattattattggcatatcttctttttcagtttgctggtttgcatggcagaatttacgaaagcggcggatagagatgtgttggagcgagtcatttatcttgctaagagtaagggtactgtctatactttactgggcaaggtgtccgaacagtctggttttctttttgtttatgacagcaaggtggtggacaatgatcgtatggtgaagttgggggcaggacagcgcactattcgtcaggctgtttacgaaattatcggtcggcaggatatcagtctgcgcattatggagaatcatattttgatcaatcagttgcaggtgcaatgtccggttgttaccacttctaaagatactttggcctattttactttagagggcaaattgcaggataatcagtcaggggctcccattgcttacggcacggtaggggtagtcggtacttctataggcagtattaccaatcaggatggcgaattccgtttacgattgcccgattcgttgagacagggtcgcatcggggtttctcatgtggggtatgtgggacaggagatggatatgtctttattagaggctcaacacgcggtgtggtctctggaacctcgggtgattcctattcaagaagtggtgattcgtgctgtcaatcctatacggttgttgcgtgagatgttgaaagctaaaaaaacaaattatgcgtcggttcctgtttatctcactacattttatagggaaggggttcggtataaacaaaaatttcgtaatctgacagaggctgtttttaaaatctacaaaccttcttctttgttgaatcattctcaggatcatgtaaaactattaaaaatgagtcgcatagtcgatagtcaggaacgggatacactgatagccaagatgagtgcgggaattgatgcttgtttgcaactggatattgtcaagaacttgccggattttctgttgcctgacggtaagggtaatgtgtatttttatgcctcctgtgatatgacggtgatagacaatcgtttggttaatgtgatttcctttcggcaaaataaaggaataaaagaacctctttattgtggcgaattatatattgatgctgaaaacaatgcgttggttcaggcacgtcttgaaattaatcctgcttatgtgaggcaagctacggatatgtttatagaacgaaagacacggaagtggaaaataaccgcgcaagaggtggtttataccatttcttacaggcagtggaatggcatttattacatgaattatattcgtggcgatctctattttaaagtgaaacttaaacggcaatggttcagtgcttcttccttgcatacatggtttgaaatggttacctgtaaggtggatgtagataatgtgacccgtttccagcgtaaagaacggatgcctacacgcactatattttcggatacacattttaaatatgatgctgacttttggggagagtttaatgttattccgtgggaggaagaactgggtactgtcattgaaaagttgtctcctaaaatagaacagatagaatattaaaataaaagttggatacggagcattgtacttagcctcttttgtcatgatatgtgacatagaatgtgttagcctgatgtttgtaagtttgtatattcatcagtctttagtttaaaatcgattcggctgtccggtcaatattttacccgtgtcagaaagcatgcttttacacgtatgtctgcatagggctacacatattgtatgtgcggacttatgcggatgtatgtggaatctcccatataacaactacattaggcctaaaaacaactatgcaaatctgatatagtaataacaatagaagttgttaactaaatcctagtacacatctgtgaaatcattcacttccaaaagataacgagctttcttaaaagtgtcttggtctttttactgctgccggggggctatcatattccgtggaggtatgcacactttttgcgggaaaaaggcccgagaacgctctattttacattaaattggaatagtctataaaaagaagtatatataattggaagcaagcatgttatacagaaatatgcttcaaaacacagtgagggcatgggttgtaagtgagggcgataatttttgctctaactacataagttgtttataatgagtttgttgtacacaaagtgagggcatgagggcataaaggtccgaacttcctaatgggaaagaatgatgcgtcaagaagactttcggaaattgtccgaagaataaaatgatcctttaagagctaaaatccttccctatgattttgcaggtgagccgatgtttatccaatattcattttagtctatcgtgcgcgatatataatatggtgtgtactttttgatattgcaaaatggattatcgaaataaacattatagataatctgtaaatcagttatttataagtataatcataaaaaaaatagaaaaaacaatagatatatttggataaagaaatgaaatcaactacttttgcatccgcttagcaagagaggtaagtttaaaactgacaagatgatttgaataacatagatgaaacaaaaaagtttttaaaaaaaagttcgattttttttggtggtttaaaataaacactttatctttgcaaaacatttccgagtaaaacggaaataaacaggaataagagttctttgaaagatttaagataaacaaacaagtagtacaagccggtgcaccgtatatataatatggtgtacggaaaaacaagaaccgtcaatatttttattgtattgatagatttggagtccttgagcgtaaagtcaacttaagtgttgaaaagaatatttttacaatgaagagtttgatcctggctcaggatgaacgctagctacaggcttaacacatgcaagtcgaggggcagcatggtcttagcttgctaaggctgatggcgaccggcgcacgggtgagtaacacgtatccaacctgccgtctactcttggccagccttctgaaaggaagattaatccaggatgggatcatgagttcacatgtccgcatgattaaaggtattttccggtagacgatggggatgcgttccattagatagtaggcggggtaacggcccacctagtcaacgatggataggggttctgagaggaaggtcccccacattggaactgagacacggtccaaactcctacgggaggcagcagtgaggaatattggtcaatgggcgatggcctgaaccagccaagtagcgtgaaggatgactgccctatgggttgtaaacttcttttataaaggaataaagtcgggtatgcatacccgtttgcatgtactttatgaataaggatcggctaactccgtgccagcagccgcggtaatacggaggatccgagcgttatccggatttattgggtttaaagggagcgtagatggatgtttaagtcagttgtgaaagtttgcggctcaaccgtaaaattgcagttgatactggatgtcttgagtgcagttgaggcaggcggaattcgtggtgtagcggtgaaatgcttagatatcacgaagaactccgattgcgaaggcagcctgctaagctgcaactgacattgaggctcgaaagtgtgggtatcaaacaggattagataccctggtagtccacacggtaaacgatgaatactcgctgtttgcgatatacggcaagcggccaagcgaaagcgttaagtattccacctggggagtacgccggcaacggtgaaactcaaaggaattgacgggggcccgcacaagcggaggaacatgtggtttaattcgatgatacgcgaggaaccttacccgggcttaaattgcactcgaatgatccggaaacggttcagctagcaatagcgagtgtgaaggtgctgcatggttgtcgtcagctcgtgccgtgaggtgtcggcttaagtgccataacgagcgcaacccttgttgtcagttactaacaggtgatgctgaggactctgacaagactgccatcgtaagatgtgaggaaggtggggatgacgtcaaatcagcacggcccttacgtccggggctacacacgtgttacaatggggggtacagagggccgctaccacgcgagtggatgccaatccctaaaacccctctcagttcggactggagtctgcaacccgactccacgaagctggattcgctagtaatcgcgcatcagccacggcgcggtgaatacgttcccgggccttgtacacaccgcccgtcaagccatgggagccgggggtacctgaagtgcgtaaccgcgaggatcgccctagggtaaaactggtgactggggctaagtcgtaacaaggtagccgtaccggaaggtgcggctggaacacctcctttctggagaggatccaaagtaaaggtttttgtttttgtactgctgttgttgtttattcaagatatgattccgtattaagacggaagcgagaaagtaagaagccgggtctaatgaaacagactaggttgaacttagtcctatagctcagttggttagagcgctacactgataatgtagaggtcggcagttcaactctgcctgggactacgaatcttgagattcgggggattagctcagctggctagagcatctgccttgcacgcagagggtcaacggttcgaatccgttattctccactccatcagaaacgtaagatacgaagatgaccgatctatgacatattgtacaagcaaacagtaattttagtagtaaagagctgaaagtatatatcatcccgctggcacgcaagtgtgggcgaatgaataaggaaagtaaagaagggcgcatggcggatgccttggctctcggaggcgatgaaggacgtgataagctgcgataagctccggggaggtgcaaataacctttgatccggggatttccgaatgggacaacccggcgtgttgaagacacgccacctgatcatttcaggagctaacgcagggaactgaaacatcttagtacctgcaggaaaagaaaataacaatgattcccccagtagtggcgagcgaacggggaatagcccaaaccgttcatgttacggcatgatcggggttgtaggactacgtcgttgcatgaagacatcggagaagaactttctggaaaggaagaccatagagcatgacagttgcgtattcgtatgttgtcgaagcatagtagtatcctgagtagcgcggagcacgaggaattctgcgtgaatctgccgggaccatccggtaaggctaaatactcccgagagaccgatagcgaaccagtaccgtgagggaaaggtgaaaagcacttcgaacagaagagtgaaatagttcctgaaaccgtgcgcctacaagcggtcggagctgcttaaagcagtgacggcgtgccttttgcataatgaacctacgagttgcctttgccggcaaggttaagtgtgacgacacacgtatccgaagcgaaagcgagtctgaagagggcgtatagtcggcagtggcagacgcgaaaccaagtgatctacccttggccaggttgaaggctgggtaacaccagctggaggaccgcaccaataagcgttgaaaagcttctggatgagctgagggtaggggtgaaaggctaatcaaacttggagatagctcgtactccccgaaatgcatttaggtgcagccttgtgggttactgatgtgaggtagagcgactgataagatgcgagggcttcaccgcctatcaagtcttgacaaactccgaatgcgcatcagttttacctcaggagtgagggcatgggtgctaaggtccgtgcccgagaggagaagaatccggaccacctgctaaggtcccgaaatgacagctaagttaaactaacgaagtctgactgctaagacagctaggatgttggcttggaagcagccattcatttaaagagtgcgtaacagctcactagtcgaggagtctggcgtggataataatcgggtattaagttgtctaccgaagcagtgggatcattgaaatgatcggtaggggagcattccagtcagcgtcgaaggcgtaccgcgaggtattctggagcgtctggaaaagcaaatgtaggtataagtaacgataaagggggcgggaaaccccctcgccgaaagactaaggtttcctgatcaacgctaatcggatcagggtaagtcgggtcctaaggctcagccgaagggcgatgccgatggcagaaacggttaatattccgttactacctccaggagtgatgtggagacgcagtagtgacaatgccgccatctgacggaatagatggttgaagggtgtagatgttgatcttggcaggcaaatccaccatgagaatcgaacctgatagtatgccgcgtccctcgggacaaggcaatagtgcatgtaatcatgctgccaagaaaatccgctaaactaaatcctgtaggtacccgtaccgtaaacggacacacgtagtcgggatgaatattctaaggcgcttgagtgattcacggttaaggaactaggcaaactgaccctgtaacttcgggataaagggtccctacccggtgacgggagggcgcagagaataggtccaggcaactgtttaacaaaaacacagggctgtgctaaatcgaaagatcctgtatacagcctgacacctgcccggtgctggaaggttaagaggagacgtcatcgttgagagaagcgttgaattgaagccccagtaaacggcggccgtaactataacggtcctaaggtagcgaaattccttgtcgggtaagttccgacctgcacgaatggtgtaatgatctggacgctgtctcaaccgtgagctcagtgaaattgtagtatcggtgaagatgccgattacccgcgatgggacgaaaagaccccgtgaacctttactatagcttatcattgaatctgggcacgtgatgtgtaggataggtcggaggctttgaagggggtacgccagtatccttggagccgctgttgaaatacgacccttcatttgtttggattctaacccgtgtatatggggacactgattggtgggtagtttgactggggtggtcgcctccaaaagcgtaacggaggcttctaaaggtgccctcacggcgattggtaaccgccgttagagtgtaatggcataagggcgcttgactgggagactgacaagtcgatcaggtaggaaactagagcatagtgatccggtgtttccgtatggaagggacatcgctcaaaggataaaaggtactccggggataacaggctgatccctcccaagagctcatatcgacggagtggtttggcacctcgatgtcggctcgtcacatcctggggctggagaaggtcccaagggttgggctgttcgcccattaaagtggcacgcgagctgggttcagaacgtcgtgagacagttcggtctctatctatcgtgggcgtatgaaatttgcgtggctctgacactagtacgagaggaccgtgttggacagacctctggtttaccggttgtgccgccaggtgcattgccgggtatctaagtctggatcggataagtgctgaaagcatctaagtacgaagccggccacaagattagatttctcagggtcgttgtagactacgacgttgataggatgcaggtgtaaagatggagacatcaaagccgagcattactaattgcccgtccactttccttatattttggatggtgtatacgttcggttattactacaggataagataacgctgatggcttgtcgatatgtcgctcttattcaggtggctatagcacaagggttccacctcttcccattccgaacagagaagttaagccttgtcacgccgatggtactgcgtcacagtgggagagtaggtagctgccgtttttgattgaagcctccggacttgaagaagttccggaggctttttttttgtatccacgtgtggctccggacactcatgccttggaaaaaggcgggaaatagaacaggcaggtctgaaggcccgcctaacagagaaacggaagatgattatagcgcctttatgcaagctgcatgaaccgaaaaaggatggtgtagtataaagggaaaaagtgtacgatggaaacactgatatgagatatgaagggcaaacacacttcaaaaaaacgctaaattatacgctaaaaataatatatgtctaatttatatttgaaaaatacgcacttatattatacatattggaatattattcgtatctttgtcgcccgatttatatagtattgctttgggaaagtttgataaatataaggttgaattgaagaatatgaaagcggactctgctaagtatgagtttacgctggataatcaattctttgtagatctggatggaccggaagtacagaagggaaaactgacagtagaactgaatgtgaaaaaaacatccggtgtttttctgttggattttcaaactgaaggctttgtcattgtaccgtgtgaccgttgcttggatgaaatggaattacctgtttcaacttcagataaactgaaagtaaaattaggttcttcatttgcggaagagggcgacatagttgtagtacctgaagaagatgggtatattaacattgcctggttcttgtatgagttcatagccttgaatattcctatgaagcatgtacatgcgcctgggaaatgtaacaaaggtatggttggcaagctgagcaagcatttgcgtacttctgcggacgatgaagatgatgatgacatagcggtggagttacccgaaggagatgttagcgaagggcctcaggaaatagatccgagatggaatgaattaaagaaaatattagataataattaaagtttagaaaaatggcacatcctaaaagaagacaatcaaaaacgagaactgcaaagagaagaactcatgataaggcagttgctcctactttagctatctgtcctaactgcggcgaatggcatgtttatcacactgtatgtggagcttgcggttattatagaggtaagttagcaatcgaaaaagaagctgctgtctaatcagtagctttaaacacgtttgtacgttttataaaataaagccggcgagcttcggctctgtcggctacttttttgtaagggtataaactaattaaattggaatgatggaaaaaataaatgcagtaataacaggagtcggtggatatgtaccagattatgtcttgactaatgaagagatttcaagaatggtagataccaatgatgaatggattatgactcgaatcggagttaaagaaagacgtattctgaatgaagaaggattgggtacatcgtatatggcgcgtaaggctgccaaacaactgatgcagaaaacagcttctaatccggatgacattgacgcagtaatcgtagcaactactactcctgactatcatttcccttccactgcttctatcctgtgtgataagctgggattgaaaaatgcatttgcatttgatttgcaggctgcctgctgcggatttttgtatttaatggaaacagctgcttcacttatcgcatcgggcagacataaaaagattattattgtcggtgcagataagatgtcatctatggtaaattaccaggatcgtgcaacgtgtcctatctttggtgatggtgcagcagcatgtatggtggaagctactacagaagattatggtattatggattctattcttcgtacagatggtaaggggcttccttttcttcacatgaaagccggtggctctgtatgtcctccttcttatttcactgttgatcataagatgcattacctttatcaggaaggaagaacagtatttaaatatgctgtttccaatatgtcggatattacagcgactattgccgaaaagaatggtttgaataaagataatatcgactgggtaattcctcatcaggctaatctgcgtattattgatgcggtagcttctcgtctggaagttcccttggagaaggtaatgatcaatattcagcgatatggtaatactagtggtgctacacttccgttgtgtctttgggattacgaaaagcagctgaagaaaggagataacctgatatttacagctttcggcgcaggttttacctatggagccgtttatgtgaaatggggttacgatggtagtaagagataataatcattaaactacaaatacaaatgaacgcatccgtattccgatgcgtttttttgtctgtagccaataaaatgaaagaattatgcataaggcaggatttgtaaacatagtaggaaaccccaacgtaggtaagtcaacactgatgaatttgctggtgggggaacgtatttctattgcaacgttcaagtcgcagacaactcgtcatcgtatcatgggaatcttgaatacggacgatatgcagattgtattctcggacactccgggagtggtgaagccaaactacaagttacaggaatctatgttgaacttctcagagtcggcgttggtggatgcggatatattgctgtatgtgacagatgtggtagagaaaacagataaaaatgcggactttatagagaaagttcgtaatgtcaaggttcctgtcttattgttaattaataaaatagatttgaccaatcaggaagacttggtcaagttggtggaagcgtggcacgaacagcttcctcaagctgaaattattccgatttctgctacttctaaattcaatgtggatacggtaatgaagcgtatcagggagttgctgcccgattcacctccctatttcgggaaagatcaatggacagataaaccggcacgtttctttgttaccgagattatccgcgagaagattctgctttattatgataaagagattccttattctgtagaagtggtagtggagcactttaaggaagatgctaagagtatccatatcaatgctgtgatttatgtggagcgtgaatcgcaaaaaggtattattataggtaagcagggcagggcactgaagaaggtggctaccgaggctcgtaaaacgttggaacatttcttccaaaagtctatttatctggaaacctttgtgaaagttgataaggattggagaagctcggacaaagaattgaagaactttgggtatcaaatggattaaaatcgactgtgatagccgtaaaacaagaaagaaaatgggaaatttagtagcaatcgtaggacgtcccaatgtgggaaagtctacactttttaatcgtctgaccaaaacgcgtcaggcaattgtaaacgagcaggcaggaactacccgcgaccgccaatatggcaagtcggaatgggtgggacatgagttttctgtcgttgataccggtggatgggtggtaaactcggatgatgtttttgaggaagagatccgtaaacaggtaagtctggccatagatgaagcggatgtaatcttgtttgttgtggatgtagtgaacggggttaccgatttggatatggctgtagcctctattttgcggcgtacaaagaaacctgttattatggtagctaacaagactgataataatgaattgcaatataatgccgccgaattttataaattgggtctaggtgatccttattgtatttctgcattgagcggaagcggtacaggggaattgttggatctagtggtaggtaaattcagtaaggagggtgaagaactgctggatgaggatatccctcgttttgcagtagtaggacgtccgaatgccgggaaatcttctattatcaatgcctttatcggggaggaccgtaatattgtaacagagattgcaggtactacccgcgattctatctatacccgttatgaaaagtttggttttgacttttatctggtagatactgccggtatccgtaagaagaataaggtaaatgaggatttggaatattattctgtcatccgttctatccgttctattgagaattcggacgtgtgtattcttatgctggatgccagtcgtggcattgaaggacaggatttgaatattttctctctcattcaacgtaaccagaaaggtttggtagtagtggtgaacaaatgggatttggtagagaataaggatgccaaagtgatgaaaacttatgaggaagccattcgttcccgtctggcaccgtttgttgattttcccatcatctttgcttccgctttgacaaaacaacgtattttcaaggtgctggaaactgcaaaagaggtatatcaggcacgtactacccgtattccgacagctcgtctgaacgaagaaatgcttccgttgatcgaggcttatccgcctccttcaaataagggtaagtatatcaagattaaatattgtacgcagttgccaaacacgcaggttccttcttttgtgttctttgctaatttgcctcaatacgtgaaagagccttataagcgttttcttgaaaacaagatacgtgagaaatggaatttgtcaggaacaccgataaatatctttatcagacagaaataaaaatagtggttagtggttaatgatttggttaatgggcttcgccgtgatattcccagattattaaccactaatcattttattattattttctatgttcttccacttctcttaccttgcggagcagatcagaggcgaagataaaattattcagccgttcattggtagcagtaaacacatcatcttttgtcccttcccattctttatgcccttggtagatgtagagaatactgtcaccgattcccattacggagttcatatcgtgggtattgataatggttgtcatgttgtattcagtggtaatgtcgtgaatcagttcatcgataaccaatgaggtctttgggtccagaccggaattgggttcgtcgcaaaataaatattgaggattcaaagctatggcacgtgctatagctacacgtttctgcatacctccactaatttctcccggatacttgttctgcgcttccattaagtttacacggtctaaacagaactgggcacgctttacacgatcacgatacgtgtcgttggaaaacatatccaatggaaacattacattctctagtacggtaagagagtcgaacaaggcagcactttggaaaatcattcccatttcgcggcgcaatgtctttttttcttttttattcatgttaaggaagttgcgtccgtcatacaggatctcgcccttttcaggagtcaacagaccgacgatacacttcatcaatacagtttttccagaaccgctttgaccgataatcagattagttttaccattgttaaaagtagcattgatatccaccaatacgtcttttccctcgaatgatttatataatgatttaacttgtatcatcccattaaaagttgtgttaatactaaatcggaaaatagaataagcacactgctcattaccacagaatctgtactggctttacctactgcaatagaacctccttctaccgtgtaaccgaaataagcagatacactggaaataatgaaagcgaaaaagatagatttaataaaactgcaccatacaaaccattcctgaaaactatattgcagaccataggccaaatcctcggcattcatgactcctccgaaccaacaggtgcaaaaagcaccaataattcccgagaatatgctgaaaataaccaaaaaaggaatcattgtcattaaagctataattttaggaagaataaggtatccagcagaattgactcccatgatttccaatgcgtcaatctgttgggttacacgcatggtgcctatttcggaggcaatattagaacctacctttcctgccaggatcaaacacatgatggaggaggagaattccaataacatgatttcgcgagtggtgtagcctaccacaaaacgaggcatccacgggctttcgatgtttaatttgatttgaatggtaattacggcaccaatgaaaaaagaaatcagcagtacaataccgatggaatttactcccaactgtaccatctcattgagatattgcttgaaaaacatacgcatacgttccggacgagcaaaagtacgtcccatcagcatgatatatttccctacggttgttatgggtcttatcatcatagttttcacaatttcctgcaaaagtagccttttttgtctatataaatgcaaaagaagttctgattttctgttctgttatgcgtttcctaaacttttttagtatttttgtcgcaaaatacatggatatgtcagagcaggaaatagaacaacaaaatacggtgagcgaagacaaccgtatgatacttcgtacagaaaatctggtgaagaaatacggcaagcgtacggtagtaagtcatgtttcttttgatgtgaaacagggagagattgtagggctgctgggaccgaatggtgccggtaagactacttcattttatatgactacgggacttatcgtgccgaatgaggggcatatattcctaaatgacttggatattaccagttatcctgtatataagcgtgctcagaatggtattggatatttagcgcaggaggcttctgtctttcgtaagatgagtgtggaggataatattgcctctgtgttagagttaactaatactactccggaatatcaaaaggacaaactggaaagtttgattgccgagttccgtttgcagaaagtacgtaagaatttgggagaccaactttctggaggtgagcgtcgtcgtacggagattgcacgttgtctggctatcgatcctaaattcattatgttggatgaaccctttgcaggagtagaccctattgctgtagaggatatccagcacattgtatggaaattgaaggataaaaatatcggtattttaattaccgaccataatgcattggaaacgttacgcttgaccgaccgtgcgtatctgttatttgaaggaaagattctgtttcagggaacccctgaagaactagcggaaaatcctgttgtccgtgagaaatatctaggtactaattttgtgcttcgccgtaaggactttcaattggcggaaaaggacaggcaggaaaacaatgtataaaaccggagacgtgggatataaaaaaagctctgaatctgttcagagctttttttgattgtatcagataagtaattagtctctaggtcttgcttccttgattaccaattggcgtcccatgaattccgaaccgttcagttcattcatggcctgggctgcttctgcatcattttccatttcaacaaacgcaaatcctttagatttacctgtttcgcggtctttgataacttttacagaagtaacaactccataagccgccattgcttgttccaaatctccttccttaacacggtagttaaggtttccaacatacatgttcataagtgaaaaaataaaaataaataaaataaaaaatactctctgaatggtgattattaatgaagtaggggattcgaacgacagagagtttacataagtgctattcgtacaaaagtaaaaccttgtaataaaaatcactagctataattagtatcaccagtcggacacaaaggaacgcataaattttgaatttgcaagaaaaaaaacgacttttttttcttttttttgaatcagtttcttgcccgatcattttaaataaatactttctgctgtcaattagtattttttagtctgtgtatttggtaattgaaagattaaacactaattttgcaacctctttggttaaaaacagaaagaagtaataattaaataaataaagttcagaatgaatatttcattgcaaaacgttgacaaagtgagcgcattgcttactttgaagctggaaaaggctgattatcaggcaagagtagaaaagacattgaagacttatcgtcagaaagctaatattccgggtttccgtccgggtatggtgcctatgagtttgattaaaaaacagtttggtaagtctgttcttgtagaagaggttgacaaaatgatgcaggaaaaggtaaacgaatatatccgcgataataaagtgaatatgttgggtatgccgttgcctaacgaagagaagatggctcctattgatttcgatactcaggaagatttcgaatttgtatttgatattgctttggctcctgaattcacagcagaaatctcatcagcagatacaattgattactatacgatcgaagtttcagacgaactgatagaccagcaagttaaaatgtacactcagcgtgctgcaaaatatgataaagtagagcagtatgaagacaaagacatgattaaaggtctgttggcagaattggatgaaaatggaaatactaaagaaggcggtattcaggtagaaggtgcggtaatgatgccggcttatatgaagaatgatgagcaaaaggctatatttaacggtgctaaagtaaatgatgtactggtatttaaccctgctgtagcatttgataataatgaagctgaactttcttctttattgaagattaagaaagaggaagttgctggtgtgaaaggtaacttcagtttccagattgaagagattacccgtatggttcccgctgagttgaatcaggaattgttcgataatgtatttggcgaaggcgctgtaagcagtgaggaagaatttcgcgctaagatcaaagaaggaattgcaaagcagttcgaatcagatagcgattataaattcttgattgatgttcgtgaatatttggttaacaagattggtaagttggaattccccgacgcgttgctgaagcgtatcatgttgctgaataatgaagagaagggtgaagcttttgtcgctgaaaactatgacaagagtattgaagagctgacttggcatctgattaaagagcaattgctcaagaataatgatattaaagtggaacaagctgatgtgatgaatatggccaaggaagcaactcgtattcagtttgctcaatacggaatgttgaatatccctgaagatgttctagagaactatgcaaaagaaatgttgaagaagcaggaatctgtagaaggtttggtaaaccgtgctgctgaaagcaaactttctgccgcattgaaagctaaggctactttgaaccacaaaacggtttctatggaagaattcaacaaaatgtttgaataataacttagtaagtcgaagtaagtgattgctaaaactttctaaaaaaagggtttttgaccataaattttcgttatagataagagtattagatacgttaaccgtatttttttgtacttttgtttgtttgaaaaataggggttgaaaacccttttttgttactaataactaaaccattagattatggatgattttagaaaatttgctaccaagcatttgggtatgaacagtatggtgctggatgatgtcatcaagtcgcaaggatatctgaatccttatattttggaggagcgtcagttgaatgtgactcagttggatgtgttttcccgactgatgatggacagaattatttttctgggtacacagattgatgattatacagccaatacactccaggcgcagcttttatatttggactcagtagagtctggtaaagatatatctatttatatcaattctcccggaggatctgtttacgctggattaggtatttatgataccatgcagttcatcaatagtgatgttgccacgatctgtacaggtatggccgcttcgatggctgccgtgctgttggttgcgggaacagaaggtaaacgttctgcgttgactcactcacgcgtgatgattcatcagccgatgggaggcgcgcaaggacaggcttcggatattgagatcacggcccgtgaaatccaaaagttgaagaaagaactgtataccattattgcagatcactctcatacggattttgacaaagtatgggcggactctgaccgtgactactggatgacagctcaggaggctaaggaatatggtatgattgatgaggtgctgtcacgcaaaccggctactctataatgtatttatttccatttgaaaagaataacagtactaaaaacaactcaagtttctgctatcatttaatgtaggcttcttttttaaagacgcattagggaaacttgaatatttaaaggaataaacattggaagataataaaacacctagaaacagtagaaggaaatgtagtttctgcggacgttcggaaaatgaagtcggatttctgataaccggaatgaacggttgcatttgtgacagttgctcggagcaggcatatgaaattatgcaggaggccatgcatcaaaaaaaaggtgcaccgggtgagttgaacttgaaggaacttccgaaaccaaaggaaattaaagagtttcttgaccaatacattattggtcaagatgacgcgaaacgctatctttccgttgccgtgtacaatcattacaagcgtctgctccaaaaagtggataaggatgatatcgagattgaaaagtccaatatcattatggtaggtagtacggggacgggaaaaacgttgctggcacgcactattgccaaattattgcatgtgccgtttaccattgttgatgccaccgtgctgacagaggccggttatgtgggtgaagatattgagagtcttttaacccgtttgcttcaagtggcagattataatgtggcggaagctgaaagaggcatcgtatttattgatgagattgacaagattgcccgtaaaggagataacccctccattactcgtgatgtaagtggtgaaggtgtacaacaaggtctgttgaaattgttggaaggatctatagtgaatgtaccgcctcagggaggacgtaaacaccccgaccagaaaatgattccggtcaatacgaaaaacattctgtttatttgtggtggggcgtttgatggtattgaacgcaaaattgcacaacgtttgaatacgcatgtggtaggttatagtgcggcgaaggacgtggtgaagatagaccgtggcaacttgatgcaatatattgcccctcaggatttgaaatcattcgggctgattcctgaaatcataggccgtctgcccattttgacttacctgaatccgttggatagaaccgctttgcgcaatatcttgacggaaccgaagaattccattatcaagcagtatattaaattatttgaaatggatggagtcaagctggaatttcagcccgaagtattcgaatatattgtagacaaagctattgagtataagttaggagcacgcggattacgttccattgtggaaacgatcatgatggacgttatgtttgaaattccctctcagaaagcgaaaaagtatgaagtgacacttgattttgcaaaacagcagatgggaaaagcgaatatctcgcggatgcaaacagcttagtatcaagatataaagggagagagaaagaaaaaatgcaattcttctgaaaaatattacccgaaatattcgtgtaatttgagaacttgtttataactttgttaggcaacaaaagatgtaaaacaagaaatcgggaaaaccgtgaaaaactattgatacaatgacggagaatataaatttaacggacgcattaaaaaagtattttggatttgatactttcaaaggtaatcaggaagcgatcatccgtaatctgcttgccggaaatgatacatttgttttgatgcctacgggcggtggtaaatcgttatgctatcagttgccatcccttatcatggatggaacagcaatcgttatatctcctttaattgcattgatgaaaaaccaggtggatgccatgcgtaatttcagtgaggaggacggagtagcacactttattaattcgtcattgaacaaatcggctatagaccaggttaaatcggatatcctgagcggcaaaaccaaattgctctacgttgctcccgaatctttgacaaaggaggagaatgtagatttcttgaaaggagtgaagatttcattttatgcggtggatgaagcacactgtatttcggaatgggggcatgacttccgtccggagtaccgtcgtatccgtcctattatcaatgaaataggaaaggcgccggtgattgcccttactgctactgcaactccgaaagtgcgtatggatattcagaaaaatttgggtatgcaggatgcgcaggagttcaagtcctctttcaatcgtccgaacctgtattacgaagtgcgctcgaagacaaataatattgacagggatattatcaagtttatcaaggctaatctaggtaaatcaggtattatctactgtttgagccgtaagaaggtggaagaattggctgaagtgcttcaagctaacggaatcaatgcgcgtgcttatcatgccggtatggattctgctacacgcacagccaatcaagacgggttcttgaaagaggatatagatgtgattgtagctaccatcgcttttgggatgggaattgacaaacccgatgtgcgctttgtgatacattatgatattccgaaaagtctggaaggttattatcaggaaacggggagagccggtcgtgacggaggggaaggtcagtgtattacgttctattccaacaaggacttgcagaagctggagaagtttatgcagggaaagcccgtggcagagcaggaaatcggtaaacagttgctgttggaaacagctgcatatgcagagtcttctatatgccgtcgtaaatcattgttacattattttggggaagaatatacagaggagaattgtggaaattgtgataattgtttaaatcctaaaaagcaagtggaggctcaggattcattatgtgctgtgattgaagcaatcatagcagtgaaagaaaactttaaagcagattatataattgatattcttttgggtaaggaaacgtcagaagtacttgctcataaacatgaagaactggaagtattcggttcaggcatgggagaagaagaaaaaatgtggaatgctgtcatccgtcaggctttgatagcgggttatttaagtaaagacgtagagaattacggtctattgaaggttactcccgaaggacataaattcttgaaaaaaccgaaatccttcaagattgttgaagataatgatttcgaggaggaggaagaagaaactccggttcggggaggtgcttcttgtgcagtagaccctgtgctttactctatgttgaaagatttgcgtaagaagctgtccaagaaactggatgtgccgccgtatgttattttccaggatccttctttggaggcgatggctactatttatccggtgactttggaagaattgcagaatattccgggcgtaggtgctggaaaggcaaaacgttatggtcaggagttctgcgtattgataaagaagcattgtgaggaaaatgaaatagagcgtccggaggatttgcgtgtccgtacagtggccaataaatccaaactgaaggtgtccatcattcaggctattgaccggaaggtggccttggacgacattgctgtgtcaaagggattggagttcggtgaattattggatgaagtagaggctattgtttattcggggactaagctgaatattgattacttcctagaggaaattatggatgaagaccatttgaacgatatttatgattacttcaaggaatctacaacagataaaatagatgacgcgatggatgagctgggtgatgactataccgaggatgaaatccggttggttcgtattaagtttatttctgaaatggcaaattgatttatctttggttgttttgataataataagaaagccgggcttgcataactccaagtctggcttttcttgtatcagtgtcacattcattatatagacagctttctttttattttttgttattagggatgagatagagtaagttgttgagttatccttgcaaaatgcaggggaagatataaaggaagacatgttctactaaaattcctttcttcttaacaaaaaaatattccatcgttttcccatattgaataaaatgcgtatatttgcacgcaataaaatctaaacgcataaagccctatgtcatttattgcagataaaatcgtaatggacggattaacctacgacgatgtattgttgatccctgcctattctgaagttttaccaaaaacagtcgaactcacgactaagttctcacgcaacatcgagttgaaagttccctttgtgactgccgctatggatacggttacggaagcgaaaatggccattgccattgcccgtgaaggggggatcggtgtgattcacaaaaacatgtctattgaagaacaggcacgtcaggtagctatagtgaaacgtgcggaaaacggtatgatttatgatcccgtaactatcaagagaggatctactgtgagagatgcacttgcgttgatgtctgaatatagaatcggcggtatccctgtagtagacgatgaaagatatttggtaggtattgtgacgaaccgtgaccttcgttttgagaaggatatggacaaacgtattgatgaggtaatgacgaaggagaacattgtgactaccaaccagtccactgacatggaggctgcttcgcagattctgcaagaacataagattgaaaaattgcctgtggtagataaggacggtaaactggtaggtcttattacctataaagatattacaaaagcaaaggataaaccgatggcttgcaaggatgccaaaggccgtttgcgcgtagctgccggtgtaggtgtgactgccgatacattggatcgtatgcaggctttggtggatgccggtgcggatgctatcgttattgatactgcccacggacattccatgtatgtgattgaaaaattgaaagaggccaagaaacgcttcccgaatattgatattgtggtaggtaatatcgctacgggcgaagccgccaagatgctggtggaagccggtgcggacggggtgaaagtagggatcggtccgggatctatctgtactacccgtgtggttgccggtgtgggtgttcctcagctttctgccgtatatgatgttgccaaagcactgaaaggcaccggtatacctttgattgccgacggtggtctgcgttattcgggagatgtagtgaaggctttggctgccggtgggtacagtgtgatgattggttcgctggttgccggaacggaagagtcaccgggtgatacaattatcttcaacggacgtaaattcaagtcttatcggggcatgggttctttggaagcgatggagaatggctcgaaagaccgttatttccagagtggaactgctgatgtgaagaaactggttccggaaggtattgcagcccgtgttccttataaaggtactttgtatgaagtaatctatcagttggtaggcggtcttcgtgcgggtatgggatactgtggcgctgccaatatagagcagttgcacgatgccaaatttacccgcatcacgaatgcaggtgtactggaaagtcatccgcatgatgtcgctataaccagtgaggctcctaactatagccgtcctcaataaaaacttataaatgatgccgcgtagagttgtcggtattctgtcgcttctccttgtgttcgcgttcaaaatgcgggcgcaaggagaagttgtgttatctattggtggagaaccggtaaaacgcactgaatttgaatactattttcgtaaaagccataagcgtactccggattcttttctatcttcttttatcaactataaattaaaagtacgctatgctcatgatacgggaattgatactttatcggcattccgcaggcagatggcttggtatcgtggtaagctgctgaaaaaatatctggtggatgctgagaaggaagagcagacagttcgtcagctatacctgcgaagtgagcaacgcctacaggcgaatgattggataagaattgctcatatcagtaaatacctgcctcagaatgtcggtcgtcaagatgaattgagggtattgcagcaaatggattctgtttatgcagcattgcagggaggtgcggatttttctgcgttggcttgccggtattcagatgatacgacttgtaagaatatgggagggctgttaccttggatgcctgtgaataaaaatatgcaagaatggatagataaactggcttctctggaaaagaataagatttcagctcctttttattctcctatgggaattcatattataaaatggatagaccgcaagcctggaattagttttgaagagaaacgggaacaattattgaattatctggagaaaaatggtaatcgtacctggcaggaactttctgccgggcagagggaaaggctggcatttcaggtgcaggaattacatgatgggttacttgccgcctgtttatcgcaaaaatatcagtcgggtgatggaacttggcaggaaagtgacttggagcgttttttcaaacagcataaatcggattattcttgggatttgccgcactaccgtggagcagtgattcattgtaaggataaaaagatggcttccgccattaagaaacaactgaaaagaaagccggtatcccaatgggaagatgtattgcatagactgattggaaacgcttcttttcccaaagctcgtatagaagcaggtgtctttcagataggaaccaatagatatattgataagctggtttttaaatgtggtgactttcagcccgatcccactttgccttatgtttttgtgatgggaaagaaactgaaaaaaggtccggagagttatgaggacgtaaaggatgcggttatcaaagattatcaggctgtttatcaggatgcctggttgaaagatttgaagcggaaatataaggttgaaattaaccaagaggttttaaaaacagttaataataacggaagtaattaattattgcagtatcttcgttcactattttaatgttatatgaatatcgtgaaaaactggggagtgttacttgttattgcgggtgttttgtcggggtgcggtccggagcacgaccataagggaaaaactcctttagtggaagtagccggtgaatatctctataaagaagacttgcaggctgcacttccttttaatatttcaaaagatgatagtgtcttgtttgccgaacactatataaggaattgggtggaagatgtgctgctttttgataaggcggaagggaatattcctgataacgcgaagattgccaaactggtggagaactatcgcagggcgttgattatgcatacgtatcaggaggaactggttaatcagaaattggcaaatgagataagtgatgaggaaatcagcgcttattatgagaaaaataaggagctgtttcatacggaacatccttttgtgaaaggattgtttataaaagtacctctccattctcaggatttagcgagtgtgcgcaagtggtataagaagaataaccaggatgctattgagaatttggaaaaatacagcttacgtaatgcggtaagctatgattacttttatgaccgatggctgccattgtccgatattgctgtcaagattcctttgaaagcgcttgatacggatgagaattatttggacaagaaccggaatatagaagtaaaagacacagcgttttgctattttctgcatgtggaagaattcttgggtaaggatgaacagaggccgttggattttgcaagaaaagaaattaaggagattttaataaacctgaagcgggttgattttataaataaagtcaaagaagagttataccaacgtgcttcagataggaacaagattaattactattatttgaattcaaatgaataaattgatgtgtaccaaagtttatgcactggtgttgatgctgtttgctgccgtttctgtatacgggcaggacaatgtgatagacgaggttgtatgggtagtaggtgacgaggccattcttaaatcggatgtagagaatgagcgtctgaatgcccagtatgaaggtcgtaagtttgatggtgatccgtattgtattattccggaacagcttgccattcagaaattatttcttcatcaggctgctattgatagtattgaggtttccgaacaggaaattatcagtgatgtggaaagacgtacaaattggctgattgatcagattggttctaaggaaaaagtagaagaatattataataagacttctacacaaatacgcgaaatgctccgcgagaatatacgtgatggaaaaacggtacagaaaatgcagcagcagattgtgggggatatcaagattactccagccgaagtccgtcgttatttcaaggatcttcctcaagacagtattccttttattcctactcaggtagaagtgcagatcattactatggaacctaagattccgcaggaagaaattgagcgtgtgaagaagactttgcgtgactatacggaacgtgttacttccggtgaaatagctttctctactttggcgcgtctgtattcggaagatgaaggttcacgccgtcgtggtggtgaactcggatttatgggcagggctgagttggtacctgaatatgcgaatgtggcattcaatctgcaagaccctaacaaggtatccaagattgtggagtctgaatttggcttccatattatccagttgatcgaaaaacgtggtgaccgtatcaatacccgccatatcttgttaaaaccgaaagtggatgaaaaagatctggaagcagctttgttacgtttggattctattgccaatgatatccgtaatgagaaatttacttttgatgatgccgctacttatatctctcacgataaggatacgcgtaacaaccatggtttgatggcgaatccgcagactggtacggcgcgttttgaaatgcaacaattggcacaggtgtcacaagaggctgcaaagatggtggaaggcatgaatgtgggggaaatttccaaaccttttaccatgattaatgcaaaaggaaaggaaatttgcgctatcgtgaaattgaaaacccgcttgaacgggcataaggcaaccattacggaagactaccaacgcctgaaaggcatcgtgatggaaaaacgcagtgaagaaaaacttgacaagtggatcaaggataaacaaaaacatacctatgtgcgtattaatgagaagtggcagaaatgtgatttcaaatatccaggttgggtaaagaaataatgtagtgtataaagtatatgcttggaaaaagaaagaatacatactcttcgggcaggcataggatacttgtggtaagtgtcctgtgcctgttcggcttttgcttgctggctcaagtgagaccagctaaaaaaggggaacagaaaccggctaaaagtaaggtgtatctgttgcattcggatgtgttgaagaaaagtccgttgaatccagacccggatgcacagattctgattggaaacgttgcgttccgtcacgacagtgtatatatgtattgtgacagtgcttgtttctatgagaaaacgaattcgctggaagcttttgacaatgtgaagatggtgcagggggataccttgtttctgtatggggactatttgttttatgacgggaatacccagattgcccaggtacgctataatgtgcgtatggaaaacaagaacacgactttgttgacagatagtttaaactacgatcgtatttataatttgggatactactttgatggcgggacattgatggacgaggaaaatgtattgacttcggaatggggggaatatagtccggctaccaaaatatctgtgttcaattatgatgtgaagttggtcaatcctaagtttactttgacttccgatacattacgatacagcacagcaaccaaaattgctaatatccttggcccgtctgatattgtcagtgatgctaaccatatttattcagaattgggtttttataatactcagatagggcaggcagaattgttggaccgttccgtgctgaccaatgaggggaagcgtttgataggagacagtctgttttatgatcgtgtaaaaggatacggggaggcgtttgataatgtgatcatgacagatacagtaaacaagaatatgctgactggtgattattgttattataatgaattgaccaagtatgcttttgctactaaaaaagcggtagtagtggattattcacaaggtgacagtttgtttatgcatgccgatacattgcaaatgtatacctattatttgaatactgattctatgttccgggaaacgcgggcgtatcataaagtgcgtatgtatcgcgcggatgtgcagggggtatgtgactcgttggtcttttcctctaaggatagttgcttgatcatgtattatgaccctatactgtggaataacaaccagcagttgttgggagagaaaatcatgatttatatgaatgacagtacgatagactgggcgcatattcagaaccaggctttgtctgtagagcaactggattctactagttataatcaggtgacaggaaaagagatgaaggcttggtttcaaggcggtgagatgcgcaaagtagatgtgatcggttcggttcgtctggtatattatccgatggaaagcgacagtacgctgattggaatgaatgtttctgaaaccagtctgctgaatatgtttttggagaaccgaaagatgaaaaaaatgattatgagtccgaaatcgaacggtactctttatcctatgcttcaacgtccgccggagaagatgaagctggataattttgtgtggtttgattatatccgtccgcttgataaagaggatatctttgagtggcgtggaaagaaagctggtcaggagttgaagaagagcaatcggagtgctgttcctttgcccaatcataatttatttaataaaaagaaatagctatgggaatgtttaagatggaaaagccccgccgtttcaaccatcaatatatttatgtggatgaacggaaggagaagctgcagaaactggaggagaaagctaaacgcgatttgggtatgcttcctcccaaagaattttctccggaagatatccgtggaaagttcgttgaaggtactaagcatttaaaacgcagaaaagaaagcggacgtaagccaatgacttatggggctttgtttgtggccattttggttttgttgtatattttgcattacctggtgaccggtgagtttactttttaattacgcaagtttataagatatatgagcgatattatccgtttgctgccggattccgttgccaatcagatagcagcgggagaggtgattcagcgtcctgcatcagtgattaaagaattggtggagaatgctatcgatgcaggtgcgcagcacgttgatgtgttggttgtggatgcaggaaagacttccattcaggtgattgatgatggaaaaggtatgtcggaaacagatgcacgtttgtcttttgagcgccatgcgacttctaaaattcgtgaagctgctgatttatttgctttgcataccatgggatttcgtggagaggctttggcttctattgccgctgtggctcaggtggagcttcgtactcgtatggaaggggaggaattgggaacgatgttgacgatatccggttccaaggtagagggacaggaagcggtttcgtgcccggaaggtagtagcttctgtgtgaagaatttattctttaatgtaccggcgcgtcgtaagttcttgaaatcgaatcagacggagctgagtaatatattgacggagtttgaacggattgtattggttaatccggaggtgtctttcactttgcaccataatggggcggaactgttcaatcttcctgcacttcagttgcgccaacgtatcatgggagttttcggaaagaaaataaatcaggagttgttatcgctggatgtagatactacaatggtccgtgtttccgggtttgtaggaaaacctgaaacagcccgtaagaaaggagcccgccaatatttttttgtaaacgggcgatatatgcgccatccttattttcataaggctatcatggatgcatacgagcagttagttcccgtgggtgagcaagtatcttatttcatttattttgaggtgaatcctgctaatattgatgtgaacatacatcctactaaaacagagataaagtttgagaacgagcaagccatctggcagatattggcggctgccgtgaaagaaactctaggtaagttcaatgcggtaccttctattgattttgacacggagggaatgccggatattccagcctttgatgcatctccatacactggtatacagccaccaaagacgacttataatcctgattataatccttttaatgtttcggctgctcctccctcctcttattcaaagcctagtaaggactgggaacaactgtatgcggggctggaacgtcatgcttcttctcaaaactttcatcctgacgagaatgattatagggcggaagagacttctcctgcggaggaaaatcccggattgtatgatcatgtggaggactcttcagtcagtgagaaatccggccagcattatcagtttaaaggacgttttattttgacttctgtaaagtccgggttaatgatcattgatcagcagcgtgcccatatccgtattttatatgacaagtatatagatcagataagtcgtcgtcaaggtatttctcaaggaatgttgtttccagacattgtacagtttccactttccgaagttgctattttgcaggaaattatggaagacttgtctttcctaggatttgaactgactgatttgggaggaggaagttatgccataaacggtgttcctgcaggtattgaaggccttaacccgatagacttgatccaaaatatggtgcacactgctatggaaaaaggtggcaaagtaaaagaagaggtgcagagtattttggcattgactttggcaaaagcgacggcaattgttcccggacaagtgttgacgaatgaagaaatgactggtttggtggatggcttatttgctgtggctacccctaattatactccggatggtaaaacggttctttctgtgattaatgaagatgatttggaaaagctgtttaaataatttgctaatgtgctgatttgccaatgtgctgcgctatgtccacatggcaattgacacattggcatattgatgcattgttacgttataaagaacgtgaagattcttgaactaaataaaaacaaattcaatacaccgttattctttggcaggacttttgtacttttgaaaactcatttgccgtagaaagtttttttgagtaaggactttgggcagacaataaactattatatgaaaataacattacttagcttggtcctgtgcctgttttgttctttgaatatggcggcacaaggaagtgacataggtagtaatcctgaggataccaccattcatcaactttcaaaaaaagaattaagacgccagaaggtggctaagcgcaatatacattataatatattgggaggaccgagttatactccggattttggtgcgttaataggaggtagtgctcttgttacatttcgtatgaatccatcggataccttgcagaaacgttctgtgttgccgatggctgttgcggtaatgttcgaggggggcttgaatctgatggtgaaacctcagttgtttttcaagaatgataaattccgtatttttggaaaattcacttacaagaatacattggagaatttttatggtatcggctatgctaccaataagcattatgagcgcagtgactctaccagtgaatatcgttatagcggtttccagattaatccgtggtttttattccgtttaggtaaaagtaatttctttgccggtccccagattgacttgagttatgataaaatgtccgagcctgccaaatatttggtagatcagtctgattataaaaggttgggaggtactgctcacggatattctaatttcagttcgggggtaggatttctgctgacttatgacagccgggatattcctgctaatgcttataagggcatttatctggattttcgtgggctgatgtaccagaagtttttgggaggagataataacttttaccgcttggaaatggactaccgccaatacaaaagggtaggaaatagaaaagttatagcttggactgcccaaaccaagaatgtgtttggtgatgttcctatgaaccaatatgctttaagtggcactccttttgatcttcgtggatattatatggggcagtatcgtgataaatcctctcatgtggtgcttgccgaatatcgtcagatgttcaatacggataaaagtacatgggtaaagcgtatgttgcatcatttgggttttgttgcttggggagggtgcggttttatggggcctaccatgggtaagattgaaggagttcttcccaatgctggtgtgggacttcgtattgaggtgcagccgcgtatgaatgtacgtctggacttcggacgtaattttgccaatgaccaaagtttgttctatttcaatatgacagaagcattttaatggaagtaaacactatgcagaccgaatatatattaagagcgatggatgcggctttagctgccggtaaagaaattctgaacgtttataatgatcctttttctgattttcagattgaaaggaaagccgataattctccactgactcttgcagaccgtaaggcgcatgaaatcattatgacttatttgcaagaaacagactatccggtattgagtgaggaaggaaagcatttgccttacgagaaacgggcgcaatgggatacgttgtggatagtcgatcccttggatggaacaaaggaatttataaaacgaaatggggaatttactgtcaatattgctttagtaaaagaaggaattcctgtttttggagtgatctatgttcctgtcaaagaaacgctttattggggtgaactgacaaccggcgcttataaaatggaaggagtgaccggacgtgcagaccgttcactggaagaaatgaaggcatcggcattccgtatgccttgtgccgaaacaaatgaagtttttgttattgttgcttcccgttcccatctgtcggccgaaacagaagagtatattaaggaaaagcgaaagatataccctcatgtggagttggtatctgtgggcagttccatcaagatttgcagggtttgtgagggactggccgatgaatatccccgttttgcccctactatggagtgggacacggcggccggtcatgccatagctaaggcatccggagcagaaatatatcaggcgggacaaaaagaaccgttgaaatataacaagccggacttgctgaatccttggtttatcgttaaacgaaattaatacccggaaacgatgctgacatttaaaatgattattgtgttttttggattaatagggatggtgactgcgctagtccttgataaaatgcgtcccggaatgattctgttctctgttactgtactctttctttgtttcggtatattaactccgaaagagatcttggagggattcagtaataaagggatgattaccgtagcgctgctttttctgatcagtgaaggagtccggcaatcgggagcgttgggacagttgataaagaaacttctgcctcaagagaaaacaacggtcatgaaggcgcaggcacgtatgctgcccgttatttcttttgtttctgcttttctcaataatacgccggtggtcgtgatttttgcgcctattattaaacgttgggcggaatctgtctgtattccggcaaccaaattcttgatccctatttcgtatgctactatactggggggaatgtgtacgcttattgggacttctactaatctggtagtggatggtatgattttagatgccggatataagggctttggtatgtttgaattaggccgggtgggtattttcattgctttggcaggagttgtttatttgttgttcttttcttctaggttgttgccggaggtacggaaagacacggtaggcgacgaacatggggaagcggatgcgtcttcttttcatcgtgttgaagcggtgataggtgctcgtttcccgggtatcaataaaagggtgggggattttaattttgtccgtcattatggcgctgaagtaaaagaaataaaacgaagcggagttagtattgtagataatctgtcacgtgtgaagtttcgtgagggagatacgttggtgctatgggcagatgattcatttatctctacatggggagactcttctgtattcgtgttattggccaatggcaaagataccgagccgaaagctgggagaaagaaacgttggtttgcattgactttattggtgttgatgattgtgggggcaacagtaggagagttgccttttatggaagaattacttcctggtattgatcttgatatgttctttttcgcagctataacgactgtgataatggcatggaccaaactttttccggcacgtaaatatacaaaatatatatcatgggatatcttgataaccattgcctgtgcgtttgctataagtcgcgccatggtaaattccggagtggcggatgtcattgcgcatggaatcattgatatgagtgatgattatggtccgcatgtgttgctggctgttttgtttatcattacaaatctgtttaccgaactgataaccaataatgctgccgctgcattggcttttccgcttgccctttccttatccaatcagttgggggtaagtcctatgcccttttttgttgtcatctgcatcgctgcatctgccagtttttccactcctatcggttatcagactaatttgattgtgcagggtatcggaaactataagtttatggattttgtacgtatcggtttaccgttgaatatattgacatttataatttcggttattctgataccgctgatatggcctttttgatgaagttaaagacaaaatgaaaatagagaatggaagaagaaaacatatatcctatatttgaccgtatgctttcccggaaagataaagaagaactgctgggacaacggggagttatgctgtggctgacgggactcagcggttccggtaagagtactattgccatagctttggaacgtgaattacataaacgtggtttgctctgccgtatattggacggggataatattcgtagtggcatcaataataatttgggcttttcggcagaggatcgtgtggaaaatatccgtcgcatagccgaaataggcaagctgtttgttgatacaggaatcattaccattgccgctttcatcagtcccagtaatgagctccggcagatggcaacccgtatcatcggggcggagaattttctggaaatttatgtcagcactcctttggaagagtgtgagaaacgtgatgtaaaaggactttatgccaaagcgcgtcggggtgaaattaagaattttaccggcatttctgcaccttttgaagctccggagcgtcctgcattgtctttggatacttccaaactgagcttggaagagtcggtcaatactttgttggaactagtgctccccactgttggtaaaaaaggagaaaaaatataattcattataaaatggaagaaaattataaattgagccacttaagggaactggaagctgagtctatccatatcattcgtgaagtggcagctgaatttgagaatcctgttatgctttatagtattggtaaagattcgtctgtcatggtacgtttggcagagaaggctttctatccgggaaaggtgcctttccctttgatgcatatcgattctaaatggaaattcagggaaatgatagagttccgtgatcaatacgccaaagaacatggatggaatttgattgtggaaagtaatatggaggcttttaatgccggagtagggccttttacgcatggcagcaaagtgcatacagatttaatgaagacacaggcgttgcttcacgggctgaataaatacaggtttgatgccgcctttggtggagcacgtcgtgatgaggaaaagtcacgtgccaaagaacgtatattctcttttcgtgaccgttttcatcaatgggatcctaaaaaccagcgtcctgaattgtgggatatttataatgctaagattcataaaggggaaagtatccgtgtgtttccattaagcaactggactgagctggatatttggcagtacatccgtttggaaaatattcctattgtgccgctttattttgccaaggaacgtcctgtggtgaatatagatggaaatttgattatggctgatgatgaccgcctgcccgaagaatatcgggaccgtattgaaatgaaggaagtgcgtttccgtactttggggtgttggcctttgactggggccgtagagagtgatgccgatacgattgagaagattgtagaggagatgatgaccactactaaaagtgagcgtaccacccgtgtcattgatttcgatcaggatgccagtatggagcagaagaaacgtgagggatatttttaaatggataagtaggaatttaaaatgaagaaatgggtgatggagaataaactgaatataaaggaatatttagataaggatgaacagaaagacttgctacgtctgttgacagccggttcggtagacgatggaaagtctaccttgataggacgtctgttgtttgacagtaagaagttatacgaagaccaacttgccgctttggagcgtgacagtaaacgtgtggggaatgcaggtgaccatatagattacgctttgttgtgcgacgggttgaaagcagaacgtgagcagggtattacgattgatgtagcttaccgttatttttcaacgaacaatcgtaaatttattatagccgatactccgggacatgaacaatatacccgcaatatgattaccggaggttctactgccaatcttgccataatcttggtagatgctcgtttaggtgtgattacgcagacctgccgccatacttttctggtatctttattgggaataaagcatgtggtgctggcggtgaacaagatggaccttgtcgggttttcggaagagcgtttcaacgaaatcgtgaccgaatataagaagtttgtagagccattgggaatcccggatgtgacttgtattcctctttcggcacttgacggtgacaatgtggtgcagaaatctgaacgtacgtcatggtacaaaggtacttctttattggaagtgcttgaaacggtttccatcgagaatgatcataatctggccgatttccgtttcccagttcagtatgtattaagaccgaatctggatttccgcggtttctgtggaaagattgcttccggtgtcatccataaaggagatgaggtgatggctttgccttccggcaagaaatctcatatcaagagtattgttacttatgatggtgagttagagtatgctttcccgccgcaagcggtgacgttgactttggaagatgagattgatgtgtctcgcggagaaatgttggtacatgccgataacatgcctgtgatagaccgtaattttgaagctatgttggtatggatggatgaggaggtgatggaccttgacaaatctttctttatcaagcatactaccaatacgggacgtacccgtatagatggcattaagtataaagtggatgtgaatacgatggagcatttgtctgttgaaaacggtaaattgaaaaaggaggatctgcctttgcaattgaatcagattgcccgtgtgacatttactactgccaagccgcttttctttgattcttatcaaaagaataaagcttgtggttctttcattttgattgaccccattaccaataacaccagtgcggtggggatgattatagacagagtggaagccaaagatatgctgaatgccatggaagttcctactttgaatctgacggatttgggtattggtgaggaatattatgaagccgtagaaaaggtggtgaaagaattggaccgtcaaggcattacagtcaagatagaaaaataacagcgtacaattaaaaaagaagagtaatgggattacttgaattcaataaactgccaatcaatacattagtaggcgccgattggaaaacttttaaggcgattactacaggaagggaaattgattcggcatatagaggaaaataccgtttgacgaaagttgtatgccgtttgctttccaccttggctccattgcaggaaaagcgatacaggaaactgttggccgataagtctttggaacacgacccggtctttatcctcggacattggcgtagtgggactacctttatgcacaatgtattctcttgtgacaaacatttcggatataatactacttatcagactgtgttccctcatctgatgatgtggggacagccttttttcaagaagaatatgagttggctgatgcctgacaagcgtccgacagataatatggaactggccgtagacttgcctcaggaggaagagtttgcattggccaatatgatgccctatacctattataacttttggttcctgcctaagtaccaacaggaatatgctgataaatacttgttgttcaatgatatcagtgatgaggaattgaaagtgtttgaggatatattcaccaaacttattaaaatttctctttggaatacaggcggaacacaattcttaagtaagaatccgcctcatacaggtcgtgtaaaagagttggtcaagatgtttccgaatgccaaattcatctatttgatgcgtaatccgtatacggtattcgaatctacgaggaatttcttcaccaatacaatccaaccgttgaaactggaggatatttctccagagacgttggaacagaatgtgctttccatttatgccaagctgtatcataaatatgaggcggataaaagattcattcctgaaggaaatttgatggaagtgaaatttgaggattttgaagcggatgcaatggctatgactgagtacatctataaatctctttctattcccggattcgaagcagctgctccggctattagccaatatataggcggaaagaagggatataagaagaataagtataagtataatgaccgtacggtccggttagtggaagagaattggaagtttgcactagatcagtgggggtattccatctaaaaaataaatgcccgcaattctgtttttataaggaattgcgggcatgattaccttctgctgacagaaggtagtgtattattgggcttcgataattacacgacggttgaatgccggaggagttaaggtgtttacaccacccattccgctgataatcagattgtttttgttgacacccaatttaaccagttcattagccacgttgttggcacggtcttcacttaactgcttgttccatgcagcgctacctgtatcactatcagcataaccggttactttcaattttagtcccggattgtcttttaccaaatctgcgatttgttgcaaatttacagtagagttggtaggaagaaccgctgaaccgatctggaaaaatacagattgaggagccggagcaatttggttcactgtaacttgttctgtaaccacttcagtgggttggttggcaagttgggcttttaattgacggttttgttctatctgttgagccaaagcggtattgatagcatccatttgtgaagaggtaagtgccatgatagcatctacatccggagctggtttgaatcctctttgtggaaatttataagtgatacccactgtagcacctgccataaagtcagggcctttactggtggtttttccatcaaatttgttttctgtacccattccgtaaagttccagatttaagtcccaggcactggccagatggaatgtattgatgataccgaaattgaatgccagtgaattacgacgtggagcatcatatgagtgggcaaaaccgaaacctacgaatggcacgaagtcgtatatgcggtcttcattatatccggctatcatgttactgacattgaataagatgtcaccatgcaaattcatgtagttgaacttatcctgatagtatccttcgcttaacatgtgaggtttggaatatgcggaaggttcactggaaaaactcttcgactgcaaaccgctatattgcaaacgtaatcctaagccgggagtaaaccatttaccgattgatatttgaagagcgggagcaatacgtttcttgaatttaccaagatcggactgatcgccgaacagtacttgtgcacctccaccaacagagaagaaccaattatcgaagaagtgattggtctctaccttgtacttatccacaggtacctccattacatctacactctcgcctacaaggacgttttgtgaattgcttttctgctgtgcaaacgctacagaacttaaactggccgcagccagcaaaaacattaattttttcatactcatttctattagttaattattgtccaggtttatcttcccaaattcaactaaataacatgagtgctgataaaaagtttgagtaggttgactatttaatatttttttatgaaagaaggctaaaaagatagtgggtatctgtgctgtatccggcatcaaaactgaatccttcccatttgaatccttttaaatccccaggattctctatccggtttttaatgatgaagcgtgtcaattctccacggcacatttttgcataaaccacaacggtggttaattttccttttttccatacctgaaattctggtgtgatcacttgtacttcttgctccacgcgtttccaatcgaataaatctttcatctccccacttgccagattgattagtattcctccttttgctttaatttctttgataaaggtgtcggtcagaattggcttccaatagtcaaacatggatattcctccacgttcaggtagtttgatatctccttccattctgtaattcttgatctggtctaacgggcggagtaatccgtaaagaaaagaagtgattcgcaagtgatcctgtgcatattgaaaatcttcaggggtaaaatcctgtgggtggatacgtttatatacgataccggtataagccagtaaggcagctaaagccgagggagagtccgaacagaaatcttgaaatcgcatatagttctctgctgctattttactgttcacacgtaaaagtcgttccagttcttcagcagagaattgggacatatcaagtgcattctgtatcgcttcagtttggaattgtggtgtactggtaacaggagtttgtattttgctccgtccggtcattgttttggcacatgaaataaaagtcatcataggctaaaaaataatattttctggcggcaaatataagaaaaacagatatatttgtctttgttattccataattaaatattgagaactatgaaaatgaaagagttaggattattgttcatgatgctttgcatggtatttgccgtaaatgctcaagaattgaaaaaaggagataaattacctgattttcatttaaaatctgcagtatatggagatatttcttcgactgaattgaaaggtaaggtcgttttggtgagtttatttgccacttggtgcgggccatgtcagctggaactggctgaaatagagaaaactttgtgggctgaatataaagataacaaggacttcgtattattagtaattggtcgtgagcatacggatgaacagttgaaggcttataatgaacggaagaaattcactttcccgttatatcccgatcctaaacgtgaggtgttctctttatttgctgaaaagtcaattcctcgcgcctatcttttcaataaagaaggagaagccgtttatacttccatcgggtatgagaaagaagaatttggatatctgatgaatgccattgcggaagcattgaaataggaccctgttgatatttcaagatgactaaactgttctcgttgtttattttattatcttttgttctcccggttagtggacagaaaaagcttgattcagataaagcaagaaaagaaaaagcttatcatttgacaggttctgtcagagaacagggagaacgcccttatcccgatcctttaccggatgtaaatatccaactttattctttgcctgatacgagttttatagaaggtacggtgagcgataagaagggtgttttccgtttgtaccctatgaatcccggtaattatttaataagggcttcttttttaggatatgaaacccttgaaaaaaaagtgaatattcctgcttatcggaaagaagtttatggaggtgctctgatgatgaaaccttccagtattgtattggatgaaacggtgataaaggccgaactgcagaaaatgaagatgtccggagatacattagtatataataccggagcctttaagacatcggaaggagctgttctgcaggatttggtgaggcagcttcccggattggaattagacgagaaatccggcaagatgaattttcatggaaaggaaatcactcagatcttattaaatggaaaggagtttttcgcagatagcaaagttgctttgaacaatatgccggtagatgctttgaaagaggtaaaggtatacgagcagcagtcggataaagagcaaatgacaggggtgtcagatggtaagaagaaaacggtgatggatgtgaagaccaagaaggatttgacagatggattaatgggggacgtttcagctttgaaaggttcgggggatatgtatggagcgaaaatgagtttgaataaatttgtcggaaaatggcggatgtccttgtatggtgatttaggaaaactccccagatatggtaattttatcagtgatatggccgataatcctgctcaaatgaaggatattggttttagcttgggaacggaaataaagaagctcaacctcaatgtcagtgcttcatataataataataaaagcgcggatgaatcgcgaagccagtcagaagaatatctgcctaacggtagccaatatgcctataataatggcttgagtacgggtaggaatagttctttttgggagaatatatatatgacgggaagtttgagtgaccggacggaaattaatttcaggcataacatcaatcatagccggttaaattcggtatcagaaaatatttcggcgactttcagtaccaatcctttggactatgtttcagagccttggagggacgatgcaatgattcctcctgagttcaggataaataaaaatacgggaaattctcaaaataagacgaacaatctgatgataggcaataatcttttgatcactcataaattgaatgatatcggtcggaaactctccatagagttaagaaatgattatagtaatcaggcgagtggtaattatcagcaatcgtctattacttattatcaattgaagaatgacctgggggcagattcggttttatatagaaatcaataccgggagtcacctgccagaaatttattattggcgggggaggtcagctatacggagccaataggaaaacaaatgcttcaggtttattatcggcatgagtatcaacggcagagtaataatgcggttacgtacaatttggatgaggatgctttgtggggaagtcttccatctggttatgaggcaggaagggtggatagtttaagtgattatactcgtaatgatcttcattccaatgaattcggactgcgtaccacacttaattggagaaaagtgaggttgaatatccggtttgggctgtcgcctcagaagtctacgacgaaaagcaacaggggaaaagtgaagatagatacgaccattaccgtgttgaacatagtgcccgaactgcattttgattatgatttgggcaataaccataatatgagtgtgtattatagcggatacacccggcagccttccatttatgatttgttgtctgtgcctgattatactaatcctctgaacataacaatggggaatccggggctgaaacccgctttcgggcaaagtatatctgtgaattacagaggaggaaatatggaaaagcaggaaatgttatattgtggtttgagatataataatacgataaatgatataagccggaaaagaacctatgatgagaagagtggggtatataccagtcggcccgagaatataaatggtaattggggcattggcgggaatatatattatacgaataaattattcaagaaaattttcgctcgtcttgctactaatgcaaattataaccggagggtttcatatgtgcagataatgggagaagccaatgagaatgatcgtaacacctcccaaatgctctacttgatgcaggacgtggagtttgcctataaattggaagagcatgagtttaagataaatggagcaatcacttatcagcaagccgataacagttatacaaacaattcggattacaggacgtatgatttttattatggcgcggagtgtcgactgaagttacctctcaacttgaatctttataccgttgtgagaagtatgaatcgcaggggatataaggatgaggcctccaatacgacgcagtggctttggaacagtgagctgacttacagttttctgaaagggaaaagagggttacttaaatttcaggttgttgatattctgcaacaacgggattttgtcaatcgttggatgaatgataccggacagggagaaacttggacttggggattgggacgttatgcgatggctacttttacttatcgttttaatgatctttcccgttaggagataaaaaaggagctgattcaggaaaaacgaatcagctcctttttgaatatccctaagaaagattatttgtaatcttgccagctctttatctgaatatccttttcactcatttcacagaatgcttcaatgaaagcacttgccaaacgggcgttggtaatcaaaggaatattgtggtcgattgctccacgacgaattttgtaaccattagtcagctcacgtttggtatggtttttcggaatgttgactatcaggtcgaatttatgttcggcaatcatcttcatgacattgttttctgcatcgggcttttcatccggccagtaaaccggtgtggtatttactccgtgtgcattcaagaaagttgcggttccggcagttgcatagatctcatatcctttttctgccagcatacggcttgcttccagcaaatctactttggatttggtggcacctgacgagaacatgacagattttgtaggaatcttgaaacctacagcaatcatagagttcagcaaagcttcatggaagtcatcaccgatacaacccacttcacctgttgaagacatatctacgcccaatacagggtctgccttgtgcagacgggagaaagagaactgggaagctttaacaccgatccagtcaatatcgaatgccgacttatccggttggctgtatggagcacccaacatgatgcgggttgcggtttcaatgaagttgcgtttcaatactttggaaacaaacgggaatgaacgtgatgcgcgcaggttgcattcaatcactttcacttcattattcttagccaagaactgcatgttgaacggaccggaaatgtttaattctttagcgatacggcgaccaatcttcttgatacggcgagctgtttcgaaataaatcttctgagccgggaatactaatgtggcatcacctgaatggacacctgcatattcaatgtgttcggagatggcatattccactacttcaccgttttgggctacagcgtcgaattctatttctttagtatcttgcatgaattgtgatacgactaccggatattctttagaaacttctttagccatctgtaagaattccttcagctcatcttcgttatagcatacgttcatggcagcgcccgagagcacataggaaggacggaccaataccgggtaacctactttgtttacaaattcttccatgtcttccaggctggtcaattctttccatgccggttggtcaatacccagctggtcaagcatggccgagaatttatgacggttttccgcacggtcgatagaaagcggagaagttcccaatacaggtaccgactgacggtgaagcttcatcgccaagttattaggtatttgtccacctactgatacaatgacaccacccggttgctccagatcaatcacgtcaagtacacgttcaaatgaaagctcgtcaaaatacagacggtcgcacatatcatagtcggtagaaactgtttcggggttatagttaatcatgatggatttgtaacccaacttgcgtgcggtttggacagcgtttacagagcaccagtcgaattctacggatgaaccgatacggtaagcgcctgaacctaatacaactaccgatttttcgttcttataataattgacgtcataacccgtagtagcgtatgtcatatataggtaattggttaattcgggatgttcagatgcgacggtattgatacgcttgacagccggaaggatattcaaagctttacgacgggcacgtacagccaagttctccttttccatattgccactggcttttaatacgaagcgtgcaatctggaagtcggagaagcctaatactttagcctggcgaagcacatcttcaggtagatcctcgatcttattataagtcgaaagtttgaccttatagtcaacgatgttttttaacttacttaggaaccacgagtcgattttggtcagttcgtggatgcgttcaatactgtatccttcttccaatgcagaggcgatggagaaaatacggaggtctgtcgggttggccagttcctcatccaggttttcaaatttagtatggtcatttcctacgaaaccatgcataccctgacctatcatacgaagacctttctgaatgatttcttcgaaagagcggcctatagacatgatttcacccacagacttcatgctggagccaatctggcgtgatacacctgcgaatttagtcaagtcccaacggggaattttacaaatcaagtaatccaactggggagcttcgtaggctgagttgggagtacccttttcgccaatctggtctagtgtgtagcctaaagcgattttagcggcaacgaatgccagagggaatccggttgctttagaagccaaggcagaagaacggctcaggcgtgcatttacttcgataacacggtagtcatttgtttctgcattgaaagcatactggatattacattcacccacaatacccaagtgacggatacattttgtagataaatcttgcaacattgttacttgttcttctgtcagagagcaagtgggggccaccacgatagattcgccggtatggattcccagtgggtcgaagttttccatgcttgccactgtaaaacaatggtcgttggcatcgcggattacttcaaattctatttctttccaacctttcaatgactcttcaaccaggatctgtttagagaatgcgaatgaactttcagccagtttgatgaaagcttcttcatccggacagatgccgctgcctaaaccacctagtgcgtaagcagagcgtaccataaccggataaccgatttcgcgggcagctttcagagcctcttccatactttccacagcgtggctcttcggggttttcatcggaatttcatccagcttctttacgaataaatcacggtcttcagtgtacatgatggcttctaccgaagtacccagtacttctacaccatatttcttcagtgtaccgttcaggtaaagttcagtgccgcagttcaatgcagtttgtccaccgaatgccaataaaataccgtccggttgttctttcttgataatttcttcaacaaagaagggagtgacaggaagaaaataaaccttgtcggctatgccttccgaagtctggatagtcgcgatgttaggatttaccaacaccgaatgaatgccttcttcgcgcaatgctttcagcgcttgtgaacctgagtagtcaaactctcctgcctggcctatcttgagggcacccgaacccaataccaggactttctttaaatcctttttcattgaaagtttcttttattataatagttgttttaatgtcgctaaatattaaaaaaaaatgcgtccatcctcgtacgaggactaacgcatttgttcgtatgtctatattatctttgttcctgtaggatacatagcattactaaattttgtgcaaagtaacgacttatttccaagataacaaaataaatcaagatctttgtcaacacaaattaaaataaaagtctgaaatcctctccgaatgttctgtttctgtatatttattcggatacttctgtatcatcggcatacgcaaagcggaatgaatatcctatatttttcgatccgcccatcagggtcatatcttttagtcttccatcctgccggaaactatagtcgtatatataataagtgtcttccagaatattggagcttctttttcctagaatttcggccatctgtccgaaagtgttcattacggtggtatagttttcgcggtcatcaatccattgtgccagtgtgttcaagtccagactataatcattggcgatattggaaactttgtaatcactgttgtaagttcctctcggagtagtggttatggaagataaatttccgctttcccaattgtactccaatacggttccattgttattgcagcttttcagataaccttcattatcataagaataggttaccgggctttcccggttggagaatttgcatacataacttctgccgttttccaacgaggtgcttatttctaccaaaggagaattttccgtagagtaagtataactgacttcagagttctctttgtacgtgtaatttactgccgctaacggtgaactgctgtaaatgcgggtcagtcgtttgttgttgtcgtaagtgaggcttatcattccctgataagtgataacatccgaaattttatgtactttaattccagtaatcatccgtgaaggctccggtacgggaatacttttatcgtcatcatcggaacatgcggcaaagaacaagcttgctacagaaataaatagaactagtttaatgctctgtcttagtttattcatagaaacaattattatatgtgaaatagcgattcaaagttaagtgtttgtgtcagaatattcctatctttgcgtaatttttaatataagataatatttaagagatatgggaaaagaaaaaatcatattgaccggcgaccgtcctacaggaagattgcatatcggtcattacgtaggttcgttgaaacgcagagttgagcttcagaattccggattgtatgacaagacttttattttcattgccgacgcacaggcattaaccgataatatagaaaatcccgagaaggtacgccagaatgtgattgaggtagcgcttgactatatggctgtcggtttggacccgatgaaatctactatctttatccagtctcagattcccgaattgtgcgaattgactttctattatatggatttggttaccgtttcacgtctgcaacgtaatccgacggtgaaaaccgaaatccagatgcgtaactttgaaactagcatcccggtgggattttttacttatcctatcagtcaggctgccgatattaccgctttcaaggcgactactgttccggtaggtgaggaccaggagccaatgatcgagcagactcgtgagatagtacgccgtttcaattatatttatggtgacacgttggtagaacctgaaatcctgttgccggacaatgcggcttgtcttcgtttgccgggcacagacggaaaggcaaagatgagcaagtcgttagggaactgcatctatctgtccgatacggctgatgaagtggaaaagaaggtgaagagtatgtacactgacccgactcatttgaaagtctctgatccgggtaaattggaaggaaataccgtattcacttatttggacgctttctgcaaacccgagcatttcggtcgttatttgccggattatcctaacttggatgaactgaaggcgcattacacccgtggtggattgggagatatgaaggtgaaaaagttcctggccgccataatgcaagaggaattgactcctatccgcgagcgtcgtaaagagtttgaaaaggatattccggctatttacgaaatgttacgtaagggttgtgagacagctcgtgctacagcggctgctacattggatgatgtgcgaaaagcgatgaagattaactattttgatgatgtggaactgattgctgaacaggcaaagcgtttcggccaagaataaaataaatttcgatataaagggggaactatatataataaggtatagttcccctttttgttttacttaattcataaattaaatgatgattatatattctgtatatcagtgatttaagtgttatggtgaaaaataaatgaaaaattagtatgcataaaatttgcagttatcagaaatagccgtatctttgcaacgcttttaaaacaagaagctaccgggcgtttagctcagctggttcagagcatctgccttacaagcagagggtcggcggttcgaatccgtcaacgcccacttttttcctttttcttgttttagaagcaaccttcgggcgtttagctcagctggttcagagcatctgccttacaagcagagggtcggcggttcgaatccgtcaacgcccaccgaagaaagaaattaaatattgcacgagaaagcactatcgggcgtttagctcagctggttcagagcatctgccttacaagcagagggtcggcggttcgaatccgtcaacgcccaccaatagaatgaagccttgcacacaatgatgcaaggctttttttatattaataagctccgtttagtatgtatggtcatgaaaacattgctacttgtcgataaccaggacattacccgtgaaggtatgaaagctgtggccggtcgggtgggaggttttaccgtgataaaggaagcgggcagtcagaaagagcttacccgacttttgattgatcatcccaatgccgttgtcgtattggactatacattgtttgatacttcagctgaatacttgcttattttgcaagaacggtttaaagaagcgcatttcattctgttcagtgatagtttaagtgaggattttatccggcgtatggtttttggcggaacttcattcagtgtggtgatgaaagatgcgccgatgatagagatagaggaagggctgcggaaggcggagcaacgtttgcaatacatttgtacacgcattgcctggcaattgcagcataaagaagaaaagaaagaaaaacggggctcatcgcttacggttactgagtgtgaaatattgaaactgatggcattgggtaaaacaacgaaagagattgcggctgagcgtttccttagtgtatatacggtgatgacccaccgcaaaaacatctttcgtaaattagaagtcaataacgtgtacgaagcgacaaaatatgcacttcgtgcggggattgtggatgcggtggaatattacatttagggtaaagtgatttcgccacttcccacacaaatttccgcatctttgtcatacagcacgccgaactgtccgggggcaatgccctgcaaaggttcgtggctgtggatttggaacagaccatttccccgggtcagtgttcctttcatgaaagtatcggtatgtcgaattttgaaggaaatgtctacaggtgagtctccttcccataagtcctctgtgatgaaatggaaatcgtgtaaggcaaagtccgtaccgtattgcttttcggtatcatatccgcgtgaaacataaataatgttctcatttatatctttgcggatgacaaaccacggtcctccactcagccccagtcctttgcgctgtcctatggtatgaaaccaatatcctttgtgagtgccaatccgctttcctgtttccatttcaatgatggctccttctttctcacccaagaaacggcgaaggaaatcattataattgatttttccaagaaagcagataccttggctgtccttgcgttgagcactgggtaatttggcgacacgggcaatatctctgacttcattcttcatcagaccgcctaaaggaaacatcagttttgaaacttgcagataatctatttgtgccagaaaatccgtttggtccttgacgggatcttgtgcggttcccagccatatttttccatctttttcaaggatactggcataatggccggtggctgttttgtcatacagatgtcccacctcctgctcgaagcatccgaatttgatgagcttgttacacatcacatccgggttgggggtaagtccatgcttcactttatcgatggcgtatgccaccacattgtcccagtactgccggtgcaggtcgatgatattcaggttcaaaccatatttgcgggcagtggcggtacatagttcgatatcctcttctgcggtgcaggtcaggtcttcatcgccatccattccgatttttatatagaaaaggtccggtttatatccttgtttacaaaggaggtgtacgacaactgcgctgtctacacctcctgaaattaatgcagctatattcattttgttttattataacggatattcttcaaaagcataaagtacagtagacaagtagcgttctcccgtatcgggtaagaggactacaatttgtttcccctcattttctggcaatttagccagctccaaagcggcataagctgctgctcccgaagatattccaaccaataacccttctgtcagagaaagttcgcgtcctgtgcggatggcgtcatcatctttcacccggattattttgtctaccaattttccattgtaggtatgggggacaaatcctgctccaataccttgtatcttgtgcagccccggatttccacccgaaaggacgggggagttatccggctctacagccacaatctgtatatggggattctgtttttttaatccttccgctactccgcttaaagtgccgcctgtgcctactccggcaacaaatatatctacctttccgtccgtgtcattccatatttcctgcgcggtggtacgtacatgggcggcaggatttgccggattctcgaattgtcccagaatgacagctcccggagtctgttcacgcagttcttccgctttttctatggctcctttcataccttttgcaccttcggtcagtactaattgcgctcccatagctttcagcaggttctggcgttccttgctcatggtttcgggcattgtcaatatggctttgtaacctttcacactggcaacccatgccaatcctacgccggtgttgccgctggttggttcaatgataacggctccgggtttcaagatgccttttgtttccgcatcctctatcattgccagggcaatgcggtcttttacacttccgccgggattgaaatattccagtttggcaactacttgtgctttcgcgtcgtgttttcggctgaggcgtgacagctccaacagaggagttcctccgatgagctcagtcaattcttttttaattcttgccataatcttttcatttagtggattctaatgttataatgcaaagatagggggagatgttcatgatgacaataccctatttatggtatattttatcgtgttgtctcttgaataattgtgtatctttgtccggaattaacaaatctaacctatgatgaaaacaagaaatcttattgggatgatagccttttgcttgtttgcattggcagcttgtaccccttcaaaagagtcgggaaaaacactgactgttctttcatggaatgtatggcatggcggtcattcaaaaacttaccccgaaaagggatgtaagggaactatcgatattctgaaaaaaagtgaggctgatgtgatcttgatggttgaaacttatggagccgctccgatggtagccgattcattgggatattcatacaatctcatttctgataatctttgtatttatagccgctatcccattatccggaaatatgcttttgccgacagcataagtacctttaatttcggcggagtgatgatagatgtgaatgggaaacctgtccgggtgtttgatacttggttgcattacctccctgatatgcgtttggcaccaacagataaatctgaggaggaaatattggcttgggagatggaggggacacgtgatgaggaaatacataggattttgactgttattcggcctttactggcagaaacagacagtatcccaattataatgggaggtgattttaatgtgcactctcatctggattggacggaagcgacccgtaacctgtaccatcatgggggtgctgtggtgaattggcccgtttccattgctatggaagaggcaggatttaaagatagcttccgcgagatgaattccgatccggtggccagtccgggagtaacgtggctggcagatgcggattcgttggaaaccgaatgtcgtatggaccgcattgatttcatttattatcaggggaaaaccattcaagcgatagcgtctgagtgctatgacaatagcttgggtaaaacttttactttcaaaggagaagactttttctatccttcagatcatggttttgtcctctcgaaattcgaacttaaataagaattgattaaaataaatattcatgaaaaagacttttttattatcatgcctgatgctggcggcaatgcccgttatggctgcttacacaggtcgtgtatatgtagataaaaacaagaatggcgtgtttgacccaggtgaaaaaacatgggcgggcatcaaggtttccgatggcttgaatgtggtggaaacggctgccgacggtagttttactttacccggtcatgaacgtgagcgttttattttcattactactccttcgggatataaaacatttaatcgtcattatcataaaatagaagagaaacagtccggttatgatttcggcttgatgccttatagtggacggattcgcaaggatggctctcacaagtacattcatattgctgatactgaaatatttaatacggaaaaccatgaagactgggtgaataatgtgcgtgactatgccaggaatgaacaggcggcttttatcattcataccggggatatctgctatgaaaaaggcttgaaggctcatatcaaactgatgaatacggaaaatatggactgtcctgtcttctattgcatcggaaatcatgatttggtaaaggggaagtatggcgaagaactctttgaaagcatttacggaccggtatattattcttttgatgcagggaatgtgcactatattgtcactccgatgcctggaggagatcatgctcccggttataccgccgatgatgtctgccgttggttgaaaaatgatttggcgcatatccgccccggaactcccgttgttgttttcaatcatgatttactgacctacgaggatgcttttatttttaaaagcaagaatgcgggaagcattaatttgaatgaacataacctgaaagcgtgggtatatggtcattggcatattaactatatgaaaaaacagggagatgtttacagtgtttgtacttcctcattggataaaggaggaatagatcattccactaccgcttttcgtgtgatgcacgtagatagtaagggagatttcacttccgagctccgttatacctatttggacaagaatatctgtatcgcttcgcctgccggagtgatggcttcgggtgttcttccggtagctgtcaatgtgtattcttccgtgtcaccggtgaaagaagtgctctatacttgtttggccgacggaaaacctgtgctgaaaaacaagagattgctgcaaagcactgactggtcatggaacgggcagcttcctttgtctgataaacacgtgggcaaagaacttactttgcaggtaacagctcgttttaataacggagagatagctaaagcagaaagcaattttgtctgtcggactgaaaaggtggctcctttgttttctgctgattgggataatctgttaggcaatgcgaaacattccgcccccgcttccggtccattgaatctgcctttgcaactggcatggacccacaatgtcggagctaatctttacatgacttccccactgatacacaagggaaaaataattgtagcctctgtggatgaagatttaaaaggtgcggggcatgtatatgctttgaacgggaaggatggttcaactctttggagttaccctgttcgtaattccattaaaaattccattgccattgatggtgatatcgtgtttgcccaagatgctcaaggttttttgtatgccattgataccgaaaccggcaagttatgttgggaaaagcaattgcctgtaaatggtttaccagccctcatcgacggactggtggccgatgaaggaatggtttatgcaggaacaggaaagggactttgtgcttttgaagcccggacgggcaaacaactctggagaaatgaaggttggggacaaggagaagggactacgagtacgctgactttggggaatggtttgctgattggttccgcacagtggaatgcactttatggcaatgatgcccaaacaggtgagaaactttgggcggccagtgacaacgggttgcgtaatcggggggcatctcctgccatgcatggtgctttgttgtatcttatttcggataaatctttctttatattagaggcggctaccggaaaagtgatagttcgtaagcctttgccttataatgtggatgtaacttctactccgttgctcaccgacaaagagattatctttggctctgcacagaaagggctgatagccttggacagtgaaacattggaagaaaaatggacttgtccggtgggggatgctttggtttatacctgtccctatagtcgtcaatcttccgctaccattgaaaccagtgcggtatgggcgggagatatcgtttatgtagctgcttcggacggtacagtgtatggaattaataaagagaatggaaaagtggtatggaaacacgctactggggctcctgttttcgggtcggtagccttatcgggcaatgcgttggtggtttcggactttggtggaaatgtttatttgttctgtaagtagagttacattgattacgatataaatatggatggttattgtgaaatatcttccttttggggcagccgtccgattagttaagcaggaactatctagttaaataaccataaagtctgcccggaaatacttccgggcagaatcattactgtacctttgttcccataaaatatatacaggccgtgaggcctaatttaattatttcacatgacatttaaagaattagatcttatagagcctattttgaaggctttacaacaaaccggctatacaacgccgacccccattcaggaacaagcaattcctgtattattaaaaggtaaagatttgctgggatgcgcccagacaggaacaggaaaaacagcagcgtttgctatccccctcatacaacggctttatcaatcagaccataaaaaaggtatcaaagcattgatactcaccccgacgcgtgagcttgctatacagataggcgagaactttgatcaatatgctaaatataccggagtgaaacatgccgttattttcggcggagtgccccaaaaggcgcaagttgatgctttgaaacgaggcgtgcaggtattgattgccactcccggacgtttgcttgacttgcagtcgcaaggttgtatttcattgaagggattggagtattttgtattggatgaggcagaccgtatgctcgatatgggcttcatacacgatatcaaaaaagtattgaaactgattcctgcccggcgacagactttgtttttctcggctaccatgccttctgaaatagagaagctggcagattccatgctgactaatccgaagaaggtagaggtgactcctgtttcgtctactgttgatactatccagcaaagtgtttatttcgtagagaagaaagagaagaaggacttgctgctgcatttgttgaagaatccggagatagaatctgtattgattttcacccgtaccaagcatggggcggataaattggcgaagatattgaataagagtgagatcggggcggaagctattcatggaaacaaatcgcagaacgcacgccaaagggcgttgacgaacttcaaggatcacaccacaagagtgttgatagccacagatattgcagccagaggtattgatgtgaaccagctttctcacgttatcaactatgagttgcccaatatatcggaaacttatgtgcaccgcatcggccgtaccgggcgtgccggacatgacggaatagccatctctttttgtgaatcggaagaattaccttatttaaaagatatccaaaaactgataggactacagattccggttgtgaaagaccatccttgggtgactgtggaaggagtgaaagcgcaggctggtaagacggaagaactgaaggaaaaagcaaaagccaataaggcataccggggcagtaagagcaatggtgattattggcgtaggaagaaacaggttcaaagcaggcaagggcaaggcaggcagagttcggatagaaaggcttccggcaggcaaggataaagaatgacttgcctgggctgtattacaaaatagcatggacttaaatggatgtttttatacatttccatgagtccatgttttttttcgtttttatatgctccggtttaagttgcgatttttattgtgtggttttaattatgttcttcttattttttgttatttcttgctcttaagaataaacttaatttcagtgatttacgggtttatagcagcgaagacttccatttaggtaaaaataaaagctttatatgtccataaaaatgaagtatctaccctttttctataatcattggatttataaaatgtaatatcttgataattagagattattgagatatatgcaaagttccattagaacttatgcttttcgataaaatttagattaacgctgcaaatatataaaaaatgttgtagacgacaattgaaatacttatttttattataatcttaatgaaatatataaaattacctgttataagatgctgggtatatggaaaatattttatatatatgattttcaaaaatacactctaaattggtagtaatagtctttatactagacctcaagcacttattttcaataagtaatagtgaatgacgaagttctaatggtacttggtactttaagagtttttgcttttctaaaacttttaaaaatcactatatgattaagtatctaaagtccgtgggtgttttactgttcttgtcaacagtctgtaatggaacggtttacgccaatcaagaaggaagaaaaacagacgtgagagtgactcagcaaaatggtacttgtaccggagttgtaaaagatgctacaggcgaaacgattatcggtgcatctgtggtagtaaaaggttccacgaatggaaccattacagggattgatggagatttctccctgtctaatgtgcccaaaggaagcacgattgtcatttcattcgtagggtatcagacgcaggaaataaagtggacgggagtgccattgaatgttattttgagtgatgatacaaaagtcttggatgaagtggtggtagtgggatatggaacgcagaaaaaagtgaatgtgacgggtgcggtaagtatggtcggttcggatgtgatagagtcacgccctgttgccaacgtaagtcaggcattacaaggggcggttcccggtttgaatctttctaccagttcaagtgggggtgaccttaataccagcatgaatatcaatattcgtggtacaggttctatcggcgacggttctgtagatagtcctttgattttaattgatggtatagagggagatttgaattctttgaatcctaatgatgtagaaagtgtgtctgttctgaaagatgccgcttcggcttctatctatggttcgcgtgctgcatttggtgtaatcttggttacgactaagagtgggaaggccggtaaggtgaaggttaattactccggcgatattcgtttcagtaccgcgacacaggtgcccaagatggctaattcattgcaatttgccacttatttcaatactgcgaatattaacgctggcggttcaaatatattcagcgatgaaacgatggcgaatatcaagaagtatatgaatggcgaattcacagaccctagccagccggaatattggggaacaacagccaatgtggagaatgggaagtggaacaactatggctcggcttttgccaatacggattggtttgaggaattctataaaaagaatgtgccttctacacagcataatctgagtctgagtgggggaactgagaagtttaattggtcggtcagtgggagtttcttgctacagaatggtctgatttctcatgggcacgacgaactggaccgttatacgttgaatagtaaaatcggagccgaactggcttcatgggcacgcctggattactcaacaaaatggacacgcaaggattatgagaagcctcaatatctgacagggttgttcttccataacattgcacgccgctggccttcttgtccggtagtcgatccgaatggaaactggatggcagaaatggagatttatgaattggaagacgggggggtatataaggagaacaacgatgagttcacccaacagttaaagtttaccttcacgccgttgaaaggatggaacatctatgctgaaggtgctctgcgtcttaccaataataagactactcaaaacaaaattcctatttataattataatgtagccaatgagccgatgttacgtgattctggatacggaacagtgacttatgtgtatgataaccgctacaagcaaaactattatgctgtaaatgtttataccgattattctcacagctttggaaaacataatggaaaagttttgttgggcttgaactatgaacgttataatcaagacaatatgtgggcaagcggtacagacttaacaactgaagataaacctttcttgagccagacacaaagtaacaagaagaatggtgacggttattggaatcgggctacagcaggttatttcggacgtttcaattatgattatgacggtaagtatctggcggagtttaatattcgttatgacggttcttcacgttttctagccgataagcggtgggcatggttcccgtcggtatctttgggatggaatattgcccgtgaggagttctttgagaaattgagtgaaacagttaatacgctgaaacttcgtggttcttggggacaattaggtaacactagttccaattataacagtttctgggattggtatccgttctatcagcagcaggccatcagttctgcatccagcaactggctgattaatggcgaaaaacaaaatacatcttcccttcccagcatcgttaatgctaccatgacttgggaaacggtggaaacatgggatttcggttttgatttcggcgcttttaataatcgcctgaccggtacttttgattggtatagtcgtactacaaaagacatgattggtccggcacctatcttgggttctgtattgggtactaatgctcccaaaaccaacaactgtgatatgcgtacttcggggtgggaattggaaatcggatggcgtgatcagattaatgatttcaaatatggtgttcggttcaatctctcggataatcgatctaaaattctgacctatccatacgatggggagtttagcaatcaaagtatcggagggtattataatggcaagtatttaaatgaaatttgggggtatgaaagtgtcggtctggcttcttcaaaagtagaaatggacaattggctgacaaccaataagcccaactggggaagcaactggggtgcaggtgatgtgatgtataaggatttgaatggagatggcattgtcagttccggtgcaaatactttggacgatcacggtgatttgaaacgtattggtaatgcgactcctcgttatcgtatcggtttgaacttagatgcggcatacaagggatttgatttttctattttctttcaaggagtgttgaaacgcgattggttcttcggtgccggtgatgcatacttttggggagcgcaaggaaatatgtggcaaagcgcctgctttgaagatcatttggactattggacggaaaacaatactggtgcatattatccgaaaccttattttggcggtattcagaaaaatcagcagacacagacgcgttatttgcaaagtgccgcctatctccgttgcaagaatatccagttggggtatactttgccgaaatctctgttgtcaccggccggaatcagtaattgccgcatttatctgtcatgcgataatttattcactatcactagtctgtccgatatatttgatcccgaagctttcggaggatatggtgacgaaggatggggcagtggtaaaacttatccgttgcaacgtactgtttctgtgggtgtaaatcttagcttttaactaataaaaagaagaatattatgaaaataaatacaaaacacatcggattatgtcttttgttgggtgctgctataagtaccacctcgtgtaacgatctgctcgaccttgatcctgtaagccaaatcacaccggagtcattctatacatcagccgatcagctggctacttacttgaataattattatagttcctatttggttgctccctatagcggagagatgtatcatacgcagagttatagtgatggtatggcacgttctgacggtaataccgatatcatgttggctgggttgaacggtaatacgactctttttgccgatgaccattgggaagtttcttcgggaaaagcccttcagggatactatggaggggtacgcgtttacaattattttttagataaggcagttaccggttatgagaatggaacgattaccggcgatgcggaactgattaagaactatatcggagagggttacttcttccgtgcattgtgttatttccgaatgttggcctattatggtgatttacccatagttaccaaggtcttggaagataatgatgaggtcattgtagaaaacagtaagcgtactccgcgtaatgaagtggcacgtttcatattggaagatttggacaaagctatttcatatttagcaagtcgaggcaagttcaatggtcagcgtgtcaatagagaggcggctttgctgtttaaatctagagtagccttgtttgaagccacttttgaaaagtatcataaaggaagcggacgtgtaccgggagataataattggccgggagccaatatgccttataacagtggaaagaatttcagtattgatagtgaagtggattttttcttgacagaagctatgaatgctgcaaaacaggtagccgataatgcgcaactgactaccaataatcatgtaatagaacctcaaccgggtgtcatcacaggttggaatgactattttgaaatgtatagtcagccttcactggctaatgtccccgaagtcttattgtggaaacagtacagctttagcctgagtatcagtcacgatgcagcctatcgtgtgaagactggttgtgccgatggatatacccgtacctttgcagagtcttttctgatgaagaatggattacccatttatgccagcaatgactatcagggtgatgtcagcattgataatgtgaaagccggtcgcgacgaacgtcttcagctttttgtttggagtgagagtacgctgcttgattctgatcctagtgcgcctcagtacagtcagccattcaagaaacccggtatcgataattcaaatcaagaaatacgttgtatcacagggtatcagccacgtaagtattatacgtatgattatacccagactccgaatgatgagttgcgctgtactaacgcatgccctgttttccgtacagctgaggcattattgaactatatggaagcttgttatgaaaagaatggaacactggatgctgatgccagaaagtattggatgcaattgcgtgaacgtgccggggtgagcactgatattgacgctacaattgctgctaccgatctttccaaagaaaaggatttcggggtgtattcagggacttccatggtggatgtgaccttgtataatattcgtcgcgaacgtatgaacgagcttttcagtgaaggacaacgttttgccgatttgattcgttggcgctcctttgaccgtatgataactgcaaagtggattcctgaaggagtgaatttttgggataatctttatctgttgtatgatgctgatatcaaggcggacgggacatcggatgcagttgtctctggtaaagagcaaggcaagtatctacgtccttacagccgtaatttggagagttccaacgaactgcgtgatggttataactggcatgaggcatattatttgtatccgataggaatcagtgatatacgtacagcttctgctgaccgcgatataaacaatagcaatatatatcagaatataaattgggccactacggcaggcggacatgctgaaaaataatttttttcataaggttgggtcaataaatattcagaagtaaaagtattcgttttttgggataatatttttaacatagcaaaagggcagggagttcgtgaggattctctgtcttttgtcatatatggtctttagatttttcgggctgtttttggttgaaatacctggcagtgatggaggtttcgggtttgtaatccgttgatgtcagccaatgccctgacttggaaatgctttatatcaactcccagcatcaatttacccaatttgatgcaattcatgggtggatcgtattttcataggcgtaagaattggtgtgctgcaaagatcggaaaatctctgggttgacaaaggaaagagtgaaaaatatgaaaaaaagaagcccggtccattttgtggtaagcggaccgggctttacaatcaatttgtcaatcgtttataaccaatggggctgctacctccattggaactttagaactgtgcgacagggcgcgtggcgtaattgctggctttgctgttggcaactatcgcaccactaacgaaattcagataccaggcggattctgccgagtgttcggaagaagaccagtaccccttgcgtgtgaaatcattgaaacaatcttgtttgtctttgcaaatgactccggttttttgaagttcccacaacaaagtcaactcgcctgccgacggtaaataccattcacctgccgatttgccgctggtactgtattggtagcagtaacctcctgccgggtaactggaagaacttttaccaagataggcggtgtgagcctttccgttgaagtcgctgatggctccttctgacacccaggtggcaggttgtccggtttcaacatggatggttgctcccttgatgcgttcctcgtccttatcggagaagaaagaatcggcggttccgtcataataagggagaacaccgcttgtcaatgtaccgtcagcggtagtatagttttcgatgccttctatatcttctgctttgctgatccatttggtactggactggttgtcgcttaatgccacgatgcgtccgaatggagaagtggacagggtgggcgagagattgccgtccgcatcatccagggcatagacaataccgatgcaggttttattctcattcctctcgctggagaaggtagcgtcgctatagtaataatcgcctaccttggcagaaggtaaaagagtgcaagtgagtgtcggcgcttcgtatactttgcctttctccaatttgatggttgtcgaagtagctgtctcatacacttcaccggtggtggtaacaagggtgaaatgcaattgtgcttcggaagggaagaaggagatgtaagtggttccggaaataccggttttgtttttaatagtgatatttcctgtttgggtactgctaaactctccgtcttttagtttcataacggcactcgagtagaggtttccggcagtggcggttacggtaattcttgtgatgttgttcaaaggactgtcaccgttggcggtgaactggaatttaccgatggtgaccaagctagtcatttcgcaggcggaagagcctgtagtttcgttcatgctggctttacacagtgcccacgagtaatcataatttgttatacctgccagtgttccgtcttgtccgctcaggttgagggtttgagtcagagtgtcgctgctggtcgcggtgatggctgccgccgggtagaatacggcaatttcattctcattctttactagtgtcgaaagatcgcccgtaaaggtatcagaagagtcagtttctcttgtgagaatcgttttgggaacaccgctggaaccggttttcattacggccagttggctgttggcgttccagttgccttgcaggatgcctgtatcctctgcatctgaagaacggggggacagtgatgctgtgagagaaaaaggaacggtggaggttgtcgtaacttgatcatcgtcatcgctacaccccaacatgcatagagcgatgcccaaacagagaatagttgttgtctttttcatcatcgttttcgttttgctgttttatgattaaaacttgaatggtatttattatttaattttagatagcaaaggtaaatgttctcggtcgatttttctaatctattcggcgaaagctgtttttttttcgataaattaggggaataaggggaaatttgaggtgaaatgtaaagaagtggatggacgggaagcgaacactttccgtccatcctgtcaggatggcgatgattatttcttttcaccgaagtcggcttgttgtttttccacctctttcagcctttgtgcattccgttctttcagcagacgttcctgttccagttcggaagccgatttggcggctgattgtccaaaaggtgagtcgctgctcatgggaatcagcgcagcttcactttcggtatagatgagaggatgagctgccggcttgctttctaattccaacactgcgctggcaggcatttgcgagccttcgaacaatacgctggcagtgattttgattttacccggctttaaggtggattgtatcagcacgggggctgtcccccattttaccggagccggattggccagtatattcgctccgcctaaaatacgtccttctccttctacatggaatttcacataatagttgttcagacgtttgatattcccgtttttatcggctatggcggctactacggttacaaagtcggagccatcagcttttaagtcggtgttttcattgtcaacccaaagcagcagtttctcgggacgccgggccggtcgtacttcgtgcgtggcaactacttttccgtctatgatgccttcggccagtaggaacacctcgtcctgtttcttctttctcatagacatgttcttgtctatcatgaagtcgtatatatctttgaatgttataacgggtgagggcattccttctttcgttgccggcttggtgtaagtccatgtcttgccacctttattataagtaagccgcacctcgtcacaattggagtatacagtaacgtctttgggtgagaagggagtcatttcatgggcgatgtgcaccatcggtcctgtttcgaaaagacggtcttgcttttcgggcgagcgctgggctttgaacatataataagcatatttgggttgacggaatacgtccatcacaccaccatagaagggatcgggatgatagccgcgttggtggtcgaacgagtgccacaaacagccgccgacgtgttggcgcggagtacggcagagtacatcgtaacaggtgaaaggataacggggagcggcatagtgctgtgcctggatgagcatagcctgttccccccagttgcgtgccacacggctgggggagttgtgcgaattccagtcgtctacattatctccccactcgcgggtgaaataggttattttagggtcgaggcttttgatggcccagtccttgtccgcgttggccggatgagtgaagagtaccggatatacctcatgtccccgtgcttcgctgtcgcaaccggagtagcaatacggataagggtattcttgattgacaatatcgagggtattttgggcgaagtctgccggataccaggtttcattcagaataggttcccataaccatacacaagggtgattgcgatcacgccgtaccaggttgcggatatcgctatagacacgttgtgcaaattcgggggcgtcattccagaattgccatcccggagtgttgacgatgacgaacaagcccagttcgtcgcaggcgtccataaaggcggggtcttgagggcagtgagcattccggatgactttcatacctgcgtcgcgtagctttttagcgtcgcgccaatgaatgctgttggcaacggcattgcctactacggcaaaatcctgatggcggttggcgccaatcagtgggcttggataaggtttgccgttcagccagaatccgtccttgcccttgaattctacgctgcggataccgatgcggcggcggtagccgtccactacatttccttcattgtcgcggatacggacaatcaggttatataacgtaggcgtttcagggctccaaagcaggggagacttcaacattattttatcttttgaagtgactgccttgcccggacgtacttgaatgacatcgttcagaaatgcggcttgtgtgccgtcgggttgctgaagttcatattctactactcctttgaagttctttttactgtcattacgtatatgggctttcaggattatttctgcggaagtgtcggaaactttgtcgtatgacacgaaaagcccgccgcttgccatttcgttttcgaaattgggatcggtgatgaaaaccggacgatgggctattagccagcagtcacgatagatgccgccaaaataagtataatccagtacatcctgtgctttgccgggaggatagctggggtcattgctgttgtctgcccatacggctatcacattgtctgtttcccaattcagtgcgtcggtgacatcaacgactacaggcaggtatccgccaaagtgttcggtcaataaattgccgtttacgaaaactttgcttttccccatgatagcttcgaaatgcaggaaaagttttttgcctttcaattcatctgccggagtgaaatgtttgcggtaccatacctcgccttgatagttgatacatccactggcctcagtcggtacatattcaatgccgtcgggcagggaaaccattttccagttccggtcattaaagtcggtcgcttctgcacctgtaacggctcctttgtggaatcgccatgccggattcatggaatatacttcacgtccggagtttgccagttcatagaaaccggcagtagagaattcaggttggtgggctgcctgcatctcatagagagggaaaaatagtaaagcgatgagataaaataagatgttttgtttcatggttctatgtatcttgataatttaatgaaggtcaaagataagaaataaaaaaatactggggaaataaaaaagagaagcaattctgcttctctttgattgaagttgcggaggcctgactcgaacagacgacctttgggttatgagcccaacgagctaccaactgctccactccgcgatgttgtgttttgattacgggtgcaaaggtacggctttttttctaatctccaaactatttctgtatctttttctcaaataaaataatctttttagctaatgtgttgatatatagagcgtatgcgatatgttaattaacgtttgcttcaagattatactttatttgtttgtgtggtacaaagaaaaaatgtaattttgctcacatatatatgtaatgtgcaattgaacttatatggcagtatcaaagactagggctaaattggtagacgtcgcccgtcagctttttgcgaagaatggggtggatgatacgacaatgaatgatatagcggtggcttccaagaagggaagacgcacgctctatacgtatttcaagagcaaagaagacatttatatggcagtggtggagtcggagttagagatgctgtcgggggctatggagaaagtggctgaacaggatatcgctcctgatacgaaaatactgcggctgatagaaacacatctggactctatcaagatggtggtgttcaggaacgggactttgcgtgccggctttttccgtgatatatggagagtggaggcggtgcggaagaattttgaccggacggaaacaaagctgttcaggcaggtgttgacggaaggaaaggaaaagggaatctttgatatagacaatgtgaatatcgtggcggatattgtgcactattgcgtgaagggcattgaagcgccttatatacgtggccagataggtgaggaactggacgatgagacaggatgggcatacgtggcaaaaattgtgtatggcgcattggggcgtaaagaacagaataaggaataaaattaactttataattataaaatcaaaaattatgggattattaacaggaaagactgcgattgtgacaggtgccgctcgtggtattggtaaagcgattgcattgaagtttgctgccgaaggagcaaatattgcttttacagacttggtaattgatgaaaatggtcagaatacagaaaaagaaattgctgcgttgggtgtaaaggtgaaaggttatgcttctaatgctgcgaattttgaggatacagagaaagtggttaatcagattaaggatgatttcggttctgttgatattctggtgaacaatgcaggtatcacgaaagatggattgatgatgcgtatgagtgaggcgcagtgggatgcggtaatcgctgtgaacttgaagtctgcctttaactttatccacgcatgtactccgatcatgatgcgtcagaagagtggaagcattatcaacatggcttccgtagtgggtgttcacggaaatgccggtcaatgtaactattctgcttcaaaagccggtatgatcggtctggctaaatccatcgctcaggaattgggctctcgcggtatccgtgccaatgccatcgctccgggattcatcatcacggatatgacagccaaattgtctgacgaagtaaaagctgagtgggccaagaagattcctttgcgtcgtggaggtactcctgaagatgtggcggatgtagctactttcctggcttctgatatgtcttcgtatgtatcaggacaggttatccaggttgacggcggtatgaacatgtaatatgacagttgtttacgaggataatcatattgttgtagtcaataagacttcttccgagatcgttcagggagacaagaccggtgatactcccttgtcggagatggtgaaacaatacctgaaagagaaatataataagccgggaaatgttttcattggagtgacccaccgcttggaccgtcccgtcagcggattggtggtgttcgccaaaacgagcaaggcattgcccagactgaatgagatgttccgtaatggtgaggtgaaaaagacctattgggccatagtgaaagaatgccccaaggaaacggagggcgagctggtccactatttggtgcgtaacgagaaacagaataagtcttatgcatacgataaggaagtaaagaattccaagaaagctgtacttcattataaacttatcggccattctcagaattactatttattggaggtggatctgaaaaccggaaggcatcatcagattcgttgccagttggccaagatgggatgtcccattaaaggtgatttgaaatatggctctccacgttccaacccggatggcagtatctgtctgcatgcccggacggtacagttcgttcaccctgtgtcgaaggaaatgatccggttgactgcgccggtacccgaaggtaacttgtggaacggttttgagatagactaaagatagaaaacaaaaagggaatgcttcacagcattcccttttcttacttttaggcatctttcatttacttcaaaacttctccgctttcgctgaaaagtacagtgctttcagttccctctttatcagttaaaacaaccttgtaagttttagttccatcttcgtttgcttctacggcagcttctttgatagtagattctgcatagttctttgtgatagcttcctgcacggcagccggaaggtctttcacttcaataggggtaaaatcatttatcatagttatggtcacagagtccaccataaagttgtcggcgaatgctactgatgttcctaatcccattaccaatgctactgcaacaaataactttttcataattgtaggtttttactgttaatactatgttgttttgttttctctgataacagaatgacaatatctgtgccagaaaatagattgaatctttaaaatattgataattaatggattattcttagtggaggatgaaaggaacatggggataagtgtggaacatggggaatgctttgtggaattattccacatatccggcgggaagatgagtttatatgctgtaaggctgtgcccgataggaacagtaggggcaacagccttacggtacagtagcttcttgttggtaaagttattgaatatcgtacagtttcaatttgttatataaagtcttccggtctatgcctaataagatggcggctttacttttattgtttcctgtctgcttcaatgcctcaaggatacgtttcttttccgccgcttcatcatgcaggctgaacgtctgcggactggcggacattacaggttcctgcaactcataacctaattcggcaagggtgataaagttgctctgtgccaacagggtggcacgttttactatattcttcagttgccggagatttccgggccatgaatacgtttgtaaagcttggctggcagcggcgtcaaaccctatcagctggcggtccagttccctgtttgcctggtccaaaaagaaattggcgaatagcaggatatcttcttgccgttcttttaatgccggcatacgaagggtaaattcattgatacggtggtaaagatcttcgcggaagtttcctttttcaatggcttgttgcaggttctcgttggtagcgctgaccagccgcacatctacctctatttctttattggagccgaccggacggatgcgtctttcctgcaaagcacggagcaactgtatttgtacttcataacttaagttgcctatttcatccagaaacaaagtacctccgttggcttctacgaatgctcctgttttgtcgtttaacgcccctgtgaaggagccttttacatgaccgaagaattcggaagccgccagttctttggggatagaaccgcagtctatggcaatgaacggtttgtcggcccgtttgcttagctgatgaatacggtgcgccacatactctttacctgttccgctggcaccgtttatcagtacggacatgggggtgggagctaccagacctacataattgtagagttggcgcgccgcctcgctttccccctccaggaaattagagggaggaacggttgcactatggggaacggctttgctcttggatgctttgggcgtgactgtgttcttttctattcctgccggtgtaggtaaagctttgttttgcaatgcctcattaattttcttcagcaactcatccggttgtaccggttttgaaatgtaatcactggctccatgttttatggcctgtacagcgctttggatgtcagcatagcctgtcatgatgatgagtgggatgttgtatttctgttctttcatccatgaaagcaagaagataccatcttgatcgggcaggcgcagatcagacaagacaagatcgtatggttgtgcgtccagttgtttgcgtgcgcgcgcattactgcttgctgtatcaaccgaaaatccttttttacccagccaggttttcaacatggtggcaaaagtcaagtcatcttctactatcagaatggaatgtggcatctttatgtgttttttattcgtacaaaaataaacttttttcacggtgtgccgaaacacggactctatttctaataccttttaacttaacagggtttaattcttcattcttcatccggaatttcaatctgtttttgtgcttcgtcaattactttttctatttcttttactataaagtttgttttctctaccgcttcttcactgatttcagccgtccctcgtctttgttccatccatgtcagtgcaggaatgcaacgggtggctcccagcatggtgaacagcggcaacagtttatgagctattgccgtgatgccttccatattccttttcgccaacgcttcttccatatactctcggttcttttttgtttcgctgatgaaggtgcggagtatttctgcggctgcttccggatcatcttccgagaaggcggtcagggcagagaaatccaacgtttcttgttggggatggttttctttggccggtgctgtgtgaggagccggatttcctgcggcggatacgtcctttcctgtggcctggaagatggctgtaaacaattcgtttatggtgaaaggtttgtgcaggcaaccggcaaagccatgtgaacggaaataattttcgtccatatcgctacgggcggtcagcgcgatcaccggcagggttcgcacccatgatgtgtccagcgtgcggatggctttcaataaatcgaatccgttcatggcaggcatctgtatgtcggtgagcagggcgtcgaagcgcttgtctttcaatttgttgagaagctcttcgggatgatggcagcaggtcacagtcactccggggcgttccagcatggcggtggtaagctgtaactgtatgcggtcatcgtcaattaaaatcaggtggatcggctcactgtctttgcggggagtgtctatttgccggattccggttgcgtcaggggaagcaggagtatgttccgcttccggtccggagggatttttatccggatgggaaggcccctcaggcaaaggcagatatacatggaatcggctgcctttcccttgttcgctttctatcttgatatctccttcgagcagaagcaccagtttacgggtgatggccagtcccaagccgaatccttcttgtccttgtgcgttgtggagccgggtgaattcctgaaagatacgttgttgctcttcttggctgataccacatcctgtgtcactgatactgaaatgcagttggccgttttccaacgctgcttgcagagtgatgcttccttctttggtgaatttcagtgcattggatagcagattctctgctatctggcggatacggaacgggtctcctatgtatacgcggtttaatgattcgttgcaatgatagttcagttccagctgtttggagtccgccatcggtttgaagctgatataaatggtgtcgaacagttggtgggggttgaatgatacccggttgatgtccattttatgtgcgtccagccggtggtaatccagcagggatttgactaggctgagcaggtgattggctgaactttgcatattgttcagatagaaacgctggcgttcttcggtagtgatccgttccagcaggtcggtatagcccaagatggaacccacgggggccttgatatcgtgtgtgatggtcagcatcagtttttcacgcgccaccagcaagtcttcggcacggcgtttggctttttccagttctcggcggtagtggttgctgcgagtgatgtccctccatatcaggaccaggaagaaaatagccagaaccacggcgacaatggcgattcctgccactgtgcggatagagctttggcggatgtattcctcttgtatatgtttgttttgtgccagagcctgctcttcttcctctatggtacttaatagctgattgactttctgactcagtttcaagccactgaggcgcagggactgggtgcggcgattcaccatttccatccgttcctgatgggtgtcggtcacccggctctgtatgtctttcagcatggtgaccaccgtgtctgccgggctgtatgcttcggtcagcgtatcggtatattcttcctgaatcacattgctgacttgtgtggaatccgctttcccgggtgcgaacacttctcccagtcgtttgaagaagcttttgggctttttgcggataacgtatgaattggtgtgtgtgattacttttttgcgcacgtggggaaggctgagtaaagagtcttgctcggcaatcagttcgtcgatatgctgtttgtaaattttatctgttccgccgtcctgaattgcttttagcaggttgcgcatattccgttctttatccatgaaaagcattcccaccgtatccagccgtgccagttgtatgctgtcggtcagcagtgtgcgcagggagtccagcgctgtgttggcctgtttcatggcacgtttgtatcggtagtactgtcctagttgtcctgtactgagtgattgtccgataacttccgcctgataaagctggccgataatctgattggtgacatggcgccgttggctcaggatggcttcatcatcgctggttccggtcagtgacttcatctcctgataaatatatccgatggatataaagagcagtgcagtcagcaggatatagccgaatgcaactttcagcttggtggaacggttgggcaggctcatggtggttttattttaatttcgtatcacggttaaagcgtaggtaatagagtattccggctgtagtcagtccgaaaggaaatgccatccatattcctataattccccagtccatgatgaaaccgaagaaatagccggccggcagggagataaggaaataagcgatgaatgcgatatacatcatgggtttcacatctgcgattccacgaagggcattggcgaaatttatctgtaatccgtcaccaaactggtagatgatgaacggaatgataagttgtgctaccatcacgctgaccgccggactgtcactgaaccatcctcccagttcgttacgcagcaggaagatgggcagggctcctattagtgcgatgaacagcatgatatggaatccggcgtatgccgagcgccggacgtttatccggtcattctgtccgcggaagttgctaacccgcacagcaacggctgctcccatgccataatacatcataaagcagatttgggaaatggcgagcatcacttggtgggctgccagagcggtagtcccgatccatcccaccataatggcgctgaggctgaacgaagcggtttccatccccatctgcatggcaatgggccatcccagtttgttcaggtgcaggaagtctgcccggttgagcgcattgtgtagaaatccttctttataaatatgataacgccgggtacagaaaaaaatgacggcgaacacgaccaccatcatgatacgggaggccaatgtggaaattcccgctcccagcaatcccatttcgggcattcccagtttaccgtaaatcaggatgtagttgccgatgatgttcatcacatttcctgccaataagatccacatggaaacgcgggtgtcggttatgccatcggcaaattgcttgaaaccgttgaaaagcagtacaaacaacaaggatatcagtaaaacgatgaagtagggacgcattaaaggcagcagttcttcgggttgccccagccggtggatattcagatagagtatccacatgatgagtgtgagcaatactgccagcagtgtattggcaaacaggctgttcttcagcatccgtcccactacatgggtttctccccgtccgaacaggctccccacgataggggtcagcccgtatgagaatccggtagcgaaaataatggccaaagtaaacatattgttgacaaaactggcggcggctaattcattcgtgctgtgatggcctatcattaatgtatcggcaaaacccagaatgatgacacctatctggccgataacgatagggatacctaaagtgaaaagtgctttgtaatgttgcatggttaataaattgctaatgtgccaatatgccaatatgctaatttgccaactagctgcgctgtgttccgcatggcgcattggcaaattagcatattatcaggtcggcaaattacttttatagtagagtgtggaacaattttcccgcacaaatgttttttgtgccgcttcttttatctgtccggcagtgaccgagcgatacttgtttacttcattgttaatatcctccgctttgccggtcagttcaaaataagccagattggtagccacattcaggtaattcagattattgaatatctgttcgctttcatagcggttctttactttttccagctcgtcctcgtccacactttcttccgtcaatgccttcagttcctgccatacggctgtttcggcagcttccagcgtgacgcctggggcgggtttgccggtgatatggaacaatcccttgtcaatgctgcccgagatataggcgtcgatgctgttgaatacctgtttcttttgcaccagatgctgcaccaggcggcaggaacgtccgctacttagcaagtcgctcagcatatcaaaagcataatagtcgggatggcgtcgttcacagatatggaatgccataaagagcgcgtctacaggcacgttccgctccactgtcagccggcgttcctccgtttgccgaggttctgccggcagtgagcgggggggtacgttgcggcgcgggatagggccgaaccacttttcggccagtgccactgtctcttcaaaagtaatatgtcccgttacagccagaatggcattgtccggtgcataatatttaaagaaaaaagcttttacctcttcaagggtggcattggctatgtggctgatttctttgccgatggtaggccactggtacggatgcaccttataagccagggcacgtagcagatgcgaggcgtctccgtatggctggttcaggtttcgctgtttgaactcttcgattactacttgccgttgcacttccagactgcgcgggttaaagtcgagagacaacatacggtcactctccagccagaatccggtttccacattctgacgggggagggtgatgtaataattggttatgtcattatttgtccatgcgttattctcgcctccggcattttgtaccggagtgtcatagtcgggcacatggacagagcctccgaacatcaggtgttcaaacagatgggcgaatccggtatgatcaggatcttcatcgcgtgcgcccacatcgtacagcaggttcagtgccaccatctgggttgtattgtcctcattgtgtatcacacgcagcccgttagacaaggtgtatcggttaatgttaatcatctgagtcgcaaattactgaatactggccttgagaatccggatattctctacagggcggtctgcgcggttcgtttttgctatttcaatattctccactacttccatgccttcggttacttcaccgaatacggtataagaaccgtccaggtggggagcgccgcctacggtgctgtatgctttgatctgttcgggggtgaagcggaatttctcttctttgtccgccagttcacgggcttgggcttccagtgtgtcctgcaattccagtaatccggcattgtcgcccgccttgcgcatcttgtatatttccttcatgtgctggcgtgctagactgtcgaacagggcctcttcgcgctgttcgtttattttgttctccatgcccagcagttgcggttcggtgaacttgcgtccggtaacaatatagaactggcaacccgatgaagccttttcggggttcacatcatcaccctggcgtgctgccgccaatactcctttcttgtggaagaatttcggattgaattcggcgggaatggtgtaacccacatcaccgctgcccagcatggcggtatccgatgcgtttttgctgtccggatcgccggcctggatcatgaattgtttgataacccggtggaacaacgtactgtcatatactccctcttttaccagtttgataaagttatcacgatgtttcggtgtttcattatacagggccactgtgatattccccatggtggtttccagtttcactagggtacgcttttcattttccatatgatgattcgtttgttttttcgagccggcgctgcatgcagtcaatgcgatgaaggccaggcatattagtaaaattttgtttgaaatcatgagctgtttttttatttatcggacaaatataacaaaactcgctcacatacggatggatttcgcaggaataatgcaaactgttggaaataaagggagatatgcaggtttactctatattcatccattgaggggttttgacctgttcagcaggagttaagagaataatggctacttatccattgccgatttgaggttgcaaaggaacgggaaaagaccttttcctctccttgtttattattttcattcaaaaatcaataggaatggtattacttacgaatgatgcggttaatgaatagccagctcccgaatatctgaagcagcatgcccggaataccaatccggaaatcctgtgcggcaagccaggaatctcctttcgtcgcccattctcccagcgtcccgacaagctgataggccaagacgaccccaaggagcagtccgggcgaagctttcctgaaatgcgaagccgcatacccggcaaccacagccaacagaacggatttgagaaagatggcggggcagtacagccatagcaagcatcccgaacagtctatttcagttcgacaagttcgtacttctgacttcccataccgagctgttcggcatagtcgagtgtatgcatcccgtggcgcgagtcgatacgttcgatcaggtgaattttaccgtggtcttcggaggagcgtaccagatcggtgcaggcccggtcaagcgctaccgggtcaagcgaggcaaggataccgatgtcgcccatccgcggatcttcaggcgaggagtcacagtcgcagtccaccgaaagattgttggccacactgatgtagagaatcttatcgccgcaatggtccgtgacggctttggcggcctcggccatcgactccaaaaagttatcctgttcgggaaggttaccccagactttgcttacgtccttggtcgtgcctgccgaatgaatccacgccttgccgcccgacgaggcgatgccgatggagatattcttgattgcgccgccgaaaccacccatcgcatgacctttgaaatgcgacagcacaaccgtaaaatcgtaattcaagtagttcttgcccacgaaatcctctttcaggtgcttgccgccttttaccggcagggacacttcgccgtcggcatccatgatgtccactttcgcaatcgccgtaaaaccgtggtcggcagcagccttgaggtgtgcctccgtattggcacgtccgccaccataggccgtattgcactccacgattgtgccgttcattttccgtacaagtggtgcaatgagtgtcggctggagaaaattatgtccgcccggttcgccggtggagagttttaccgcaacctttccttcggctttacgaccgagagcctcgtagatcttcacaagattttccggggtaatttccttgataagatagacctttgggagttcagatgcgctatccgatgtcttgtcctgtgcctgtacatatcctgttcctatggtcaaaaataccattgcagccattatcatgctcattatctttttcatatatactgtaatttatcaattaaaagttcagatttatacctgccatcaccgtagctctcggcatcgggtatccggcattgatttcgtaacgctgtgccagcaggttttctccgcgtgcccagatgtcgagccatggggtggcacggaattgtccgcgcagattccataagacaaaatcctcggttgtagccggatctgtcgaggtgtaaagtccggcgatgtactgtatgcccgtcgataccgaccagcgtccttgcgtgaagtttgctccggcatagagcttatgttcgggagcggcaatcacgggattctccatgtgcaggtagctgtaattggcatccaccgaccaactcttattgaaacggtaagcgacctgtgcttcgacgcctgcattgtctatctctcccgaattctggttcagcataccgcttccgctcggattgggcagggtcataatcaggttcttgccatcgatatagaagagattgatgccatacgacaggcttccacccaacagtctttgcgagaaggctatctcgtagttccacatagattccggcgtcaagtcgggattctgcggcgggaacatgtacatctcacggagaatcgggtaacggaaacctttggaggcagaagccttcagttcgatggtatgaggcaggtggaatgccaatccagcctgcggcacccattctgttccgacacgggaatgatgatcaacgcgcaatcctgcgttgaacgtgagccacttcccgacatcctgccggaagtccacatagcctgccacctcgttttcatgcttatccaccaaatcgctacgtgttcccgcgtcttctccgctcacatattcgctccatgcctcgccaccgtaacggaaccagtcgaagcctacggtgatgcggttatccttgaagaaccgggcgctctgataccatgagatacccatcatgtcgtcatacgagttgaagcggtcatcctgcggaccttcccctgcggaaggcgtatagccgtcgttaatccaatggtcgccccagttgtagaagaaactcaacgcaccggaagtcttcccgtattcattttcgacggcaaaagaggtcatgccccgtgtaatgcgctggtcaccgtccagcagcggagccgataccgggccgggataagaggcgttgaagtgggtcacgttcacgtcggcacgcagattccagtggtccgtcacctcgtaaccgatccggccgtaaccgccgtactgctcgaatcccatgtcggcacgatgcccgtccgtgcggttgtacgagccgctgatgacgctcgaaaaacgccctttgcggatgcggttcgtcagttcggtttccaacgtgttgtaggaaccgtaccctgtgtgcaggtgggtgcgaatcccatcctcgtgcattttgcgggtcacaatatttactacgccacccatggcattcgaaccgtagagtacggatgccgggccacgcagtacctccacccggtcggccaggagcgtctggtaggcatcggcaatcggatgtccgaagatgccggcatattgtggatgcccatcaataagcaccatcaggcgggcattgccgccacttaacccgcgtaacgaaataccgcctgccgccccgttggagaccccgtagcccatcacgccgcgcgaagtagtgaacagacccggaacctgttccgtgagcacagggagcagggaaggctgcatcgactgctcgattcttttcctgttcactactgaaacagtctgcgacaagtggcgtatatccgtctgatgacgggttccggtaacgaccacttcgtcgatagtcaatgttctttgggctgacaagctgtctgccgtatcaggtgtttggcccgaaacggtcaggcttccggccaatatgaatgttgcaaatagtaaatgttgtttcttcatttatctgaattcattcttttagattgtaatgttataaactcttcaattcggacgagacaatcctgtggagtaaggcaataccggcaacaagtttccagcgggcaccatcccgtctttgtacggttgataatgtgcgggactgccgtaccgtaactgacgcgtaccccgctatcggcaaacaagtcgagggccggacggctgaccacgtccgcatggagctctccgacctctcccaaaatcatcagcgccgcagccgccttgcctacgactttgtccgcaacggaagctcctttcaggaaatcggaatcttcccgcagcagggcatacaggtcggccacaccgcgtctgtcgaaagttctgacttctccgttggaaacgactaaagaatgtttcccttcatgcagtaatcggatgatatcttccagcataatgtttcagaaactatattcgtcgaatgagtttggcgggattgcccgcgacaagggtattcggctccacatcgtgcgtgacgacactgccggttccacagtctgtttgggtgctttcgacgggttactgaaagtaagtaggctcataagtatcaatactatctgtttcatgtcattttaatttagcatattcttcatcaccgacaggttccagccattcggtactgttgttctcaccgggcactccgatggctaaatgcgagaaccagctgtcgggagccgccccgtgccaatgtttcacgcctgccggaatattgattgcatccccggaatgtagttccaccggctctttgccccactcctgatagtagccgcgaccgcccacgcatacgagtgtctgaccgccgcctttcgttgccttgtgcacatgccagttgttgcggcagcccggctcgaaggtcacatttaccacggggactccgtccgttaccacgggagccgtgtaactttgaccgatgaaatacttggcataggcatcgttgggtttccccacggggaaaatgatagtttgcgcgtaggcttcgagcgaacctgccgccacgctgtctgcattaccgccggtccaaacctcttttgccatacggaaagccgcccacgctttcggccagcccgcgtagaatgcggcatgggtgagtatttcggctatctcggttcgggtcactccgttcttcttcgccgattcgagatggtacttgaacgaggaatcggtcagtccctgcgacatcagggccactacggttacgatggaacggtcgcggagcgaaagcagattgttccggttccatacttccctgaaaagaatatcatcgttcaaacgtgcaaattcgggggcaaattctccgagcgcgtcgcgtccggcagtctgttggatttttacttgtgattttgccatgatcggaaaaattaaagtcaataataaagctaatgatgctacttttgttttcatacgatatgatttttagttcgacatttccaagacaaccgacaggtctttcctgtttccgatacaaaagtacaggtattatttcacagtagctttgctgtaaggctcaaatatgcgaaacagataaaatattttttgtactcttgaccttgcatggcagcagtcgccttactgttattatagaaataatatgctctttttctttatctgtcatatacagacagataaagagttatttgaaagcatgaggaatatggtggttctaaacagtttgcctttttcttatccgttgcccgttctcatgtgagtttcatataggttactgatagtcatataaaatacttcagacgcagacgcggcagacgcaggtccttttttctcacacacgtgcgtgtacctattatagagaagaaaaataaacgaggcagagtgaggagaagagaagcgccggaaagagaaaagacgaaggaaaaaagataaaaagaccggcggcaaaaccggaaggggatgataagacttggaaaaaaggaaattaaaaaagtttctgaataacatggcttgcataagtcttgaaattcgcattaaatggtagtatggcatacatcgtttcagggggaggagcctttgatgagagatgccggatttatatcgcattataatgtacacgcacgtgtgtgagaaaaaaggacctgcgtctgccgcgtctgcgtctgcgttggaagtagcttccgtcttcttgggcatctgccgttttgtgtctgtattgttcatgttatgggaacagacgggagagctgaaagatttaaatcttgcggcggtaagattatagatcttatacctgaaagattataaatctttcccggtagcaacaggtatgccgtaagttctttttttaataaattatgggaaacaaaagataaaagctgcgttctttcaaccattatgccgataaaattgtttaaatttgcaggaatacttgtacagacactcaatgaagaaaaaacagcttcgttggacattgtggacgatagcatctccgttcattctgttcatcattttatgtatattgatttatttgccacccattcagaactttctggtggacaaagctgctgtatatgcctcggaagctaccggtatgaatatctccgtgggacgtatctctttgtcttttccgttgaatctggtggtgaccgatgtagatgccgcttccccgcataaggatacgttgctcagtgtgcgccgcctgcaagtgaatgtgcagttgctgccactgctgaaaaagcaggtggaagtggatggcatatccctgcaaggagccacagtgaattctaatgacttgatacatggcatgaggttgaacggtactttgggggaattgttcatctccagtcatggagtggcgctggaccccgaaactgccatcgttaacaaagtcttgttgaaagatacggatttatctctctgcctgaatgacaccgctgcggccgatacggctgcaagcgacaccacctattggaaaataatattacaggatattgatttgcagaatgtatcctttgcactggatatgcctttggacagcttgtcattggcggcttcgctggataatgccacactgcgcgacgggctgatagacttgcataaatcggcctattcgctgcaaactttccggataaagaacgggcgcgtgcgctatgacagcgggaggccgagtgccaccgcatctgccgacagcttgtccgccggactggatccgtcccatattgccttgacggatatcggtgtgaagctggactccctgtactacgaaggcaggaatatgaaagccatcatcagtcagtttgtgctgaaagagcgttcgggggtggagatcgtttctaccgaagggcggctggtatccaatgacaaggtgctgcgtgtgccttcattgaaactggaaacccgggattcttatctggaactgaatgctgcgatggattgggatgccttggatttcaagaaggaaggcttggtgtccgcacgcctgatggctgatatcggaaaaccggatgtggtgagattcatgggaagtatggatgaaaagtttatccggaaatatccttccgaacccctgcgcatccgtacagggattgacggggatttgaacaaactgaaactgaccactcttaccgcagaacttcccggtgcattggaactgttcgccaaaggtgagctgactagcctgacggacagcttgctgcgtggaggagatatcacgctgcaagctgaaaccaaagatttgaagtttatctccacgttggccgaaggaatagaaattccatacggaacgcgcttggagggtaaatttacgatggcgggccctaaaatgggcacggacctgttgctgatgcagcctgaagcgcacgcggtggctgcggccgacactattcctatgacggtttataatgacagcatctccgtagcggatgatttcaagatggaacgggcagcccgtctgtttgccaaatacgacttgtcgcgtgacaggtatgaggcagacttggctgtcaatcattttgacttgcaccagtttatgccagccgattctttgtacaccctgtccacccgtctgaaagtggagggggaaggttttgactttttctccccccgtacttatttcaatgcaaagggcggtatagaccgttttcattatggcagttatcatttgacaggaatctcactggctgccggactggagaaatcgaaggtacatgcttcactggcagtgaaaaactggaccatggatatcaaggcgcatctggatggtatcttaaaacctcatgatgtttcgggcaacttgaaaatggatgtggctcatttggattggcaggcgcttcatctgatggatacccgttttcagacctcccagcacttgggtgtccgcttcagcagtgatctcagaaaaaggtatgccgtagaggccgagatgacaaatgccacgattgtcactgccaaacgtacttcccattccaaggacctgtttgtcggattcagcacttccagagattctacttctgcttatttacgtgcaggtgaccttgatctgagcctggaaggagcagggcacattgaatctatttccggcagggcggagatgctgatgaagaaactgacggaacaatggaatagtaaacatattgagcaggaagaacttcgggaattctttccggggctttgcctgaggatatcttcaggtcctgataatccgatagccaattacctttctatgatggggttgtcatacggccgtttgtttatggatatggattcatctccgacagagggattgaacggagaggcttatttatatggattgcgtacggacagtctggtgttggatacgatctatctggacgtgcaacaagacatgaatggaataaacctgctgagtggagtggtaaatgggcctaaaccggggcaggaagcgtttgacgtgactttggaaggaaatataggaaataataatgcccagctgttggtgcagtatcttaatgcccgtaaggaacagggggtatatatgggcgtgacggccgacttgcgccgtcacggcatacgcatgaaggtctttccggaacaccccacgctggtataccgtccttttaccgtaaacagggataattatatttatctggcggataacgggcggattcatgctaatctgaatttgcatgacgaccaaggctccggactcagtttttatacgaatcgtgaggatactattgctaaacaggatatgacttttgaactttcacgcattaatttgaaagaattccggcgtattctcccttacatgcctgatatagaagggtggataggggcggaagcacactatatagactccggtccgtatatgatggtgagcagtgatttgcgcgtggacgaattcaagtacgaaggtagtgcgctgggaaattgggaattcagcggggtgtatctgccgggtgaggagaaagatcatcatctggacgcttacatacgccgtgatggcaaggaaatagctcatttgggaggtatctatctacctgctgcggaagggacaggaagtctgagtgcggatatggcttttgagcatttcccgctgaatgttgtcaatccgtttgttcccgaccgtatggtggaactgaacggggatattgacggaactttatccatgaaaggtgacccggccaaacccctgctgaatggggaactggcattggattccgtgaccttcttcatgccggagatgtctgccatgttccgttttgacaatgaaccggtgcaggtggtgaacagtaagatgatgttcaaggattttgatatattcaccaaagggaagaccccttttacgattaatggagaggtggacttctcggatttggaacggacggcggtgaaccttaaaatgcatgccgagaattatgagttgctgaatgctccccgtaccaagcgggctatggtttacggcaagatgtatgtggactttaacgcaacgctgcgcggtcctgtggaggaactggtgatgcgggggaacatgaacatattggggaaaaccaatgtgacctatgtcctgaaagactctcccttgacggtgaacgaccgtttgggggatatggtgacttttgtcaattttaacgacacaacctcggtggaagagtcctctgtccagcaaatctctttgggagggatggatgtggccatgaccatgcatatagaccaggcggtgcaggcacgtgtggatctggtgccggacggctccaactatatgttgctggaagggggcggagacttgtcattccagtacactcctcagggggatatgttgctgaccgggcgttattctttgatgagcggggagatgaaataccagattccgattattccgctgaagacttttaatattcaaaatggcagttatgtggagtggacgggaaatatcatgaatccgcaactgaacattaccgcgactgaaagggttcgtgcttcggtgggcgaggatggaaagacttcgcgtatcgtcgggtttgatgtagggatcgctttgagccagagtctggagaatctggggctggcgtttaccctttcggctcccgaggatgcgtctgtgcaagaccagctgaatgccatgtcggtggaggaacggggaaaactagctgtcaccatgctggtgaccggaatgtatatggctgaaggaaactctacgggaggatttaatgtgaataatgccttgaactcattcttgcagagcgaaatctcgaatattgccggaaaagcacttgatatcaatgtgggcatggaaacggtggatgatgccgatagcggcgggaaacgcacggattataacttccagttcgccaaacgtttctggaataaccgcttccgtatagtggtaggcggtaaagtgtctaccggaagtacggtacagcaggatgaaacctttattgataatgtatccatagaataccgcctggacaacagcggtacccggtatgtcaagctcttccacgacaagaattatgagagtgtgctggaaggtgagatcatagagaccggtgtgggtattgtgcttcgcaagaagatgagccacctgggcgaactgtttattttcaagtctaagaagaaaaaatgatcgttggagatatggagagaaaacataacataaacctgcttctattatcggtattgttgctggtgacagctgcctgctctactaccaggaacttgccggaagacgaaacgctatatgtcggtgtgaaaaatatggagattctgaatgaggacaagacccctgccggtgtccagactttggaagaggtggaggctgctttgtcttatcctcccaataatgccattctgggaagcaactccttgcgttttcccattcctttcggtttgtggatatacaatgattttgtgaaataccaggataaaaagggggtggggcattggatcttcaacaagctgggggctgctccggtgtatttgtctacagtgaacccggaaacccgtgtgaaggtggcgaccaatctgttgcacgattatggctttttcaatggtgctgtgacttattctgtagactcgttgaagaatcctcggaaagccaagttaagttataagattgatatggcgaacccttattatctggactctgtcatgtatctgaaatatcctcctcgcgccgatagtctgatcagggctgcttatgaccagagggtattgcataaaggagataatttcagtgtattgaaactggaggaggaacgccagcggctgagtacccttttccgtaacaatggttattattatttccgtcccgaattcattactttccgtgcggataccttgcgcaaaccgggaatggtcagtttgcaggttgtcccgaaagccggagtgcctgccgatgcgaaaaaaccttattatatagggaatacctctgtttatctcaccggatataaaggggaggaacccactgattccatcgtctttccgggaatgactttacactatagcggtaagaaacccggtatccgccccggagtattggctaagcgcttcttttaccagaaagggcagctttattctcaggcccgccagaattttacgcaggaagccttggcgcgtctgggcattttcaaatttgccgagttccgctatgccccgcaagatacattgccggggtgtgatacgctgaatgtgcggatgaatgctacattcgatttgccgtatgacggagaactggaattcaatgtgactaccaaaagtacggatcagactggtcccggagcgattttcagcctctcgcggaagaatttcatgcgtacagccgccacgctttctttccagttgaaagggtcatacgaatggcagaccaattctacggcggatgggaacagttctaaattgaattcatacgagctgggaacttctttctcattggagtatcctcgcctggtgttgccgtggatgagtaaaaaaatgatgcgctcacgatttccgcagcatacctcgttcaagttgtatgccagtcagttgaaccgtgcccgtttctttaaaatgctttctttcggtggaacggtgtcatacgatttccagccttcgcgggtatggaaacatacggtgactcctttcaggctggcatttaatacgttgcagcatactactacacgttttgatacgatagtggacaagaaccggagtttgaaaatcagtttgggaaatcagtttatcccggctatgagttatacgtttacgtatgataacgccccgttgaagaaacgcaataatttatggtgggagacgtcctttacttcggctggtaatctgacttcgttggtgtatgctgcttttgggaaaggattcaaggaaacagataagaagttattgaacagtccttatgcgcaattcctgaaaatgacatccgaagtgcgttgtttgtttaaagtcggagagaaacagcatatagccactcgtttgatgggggggattttgtatgcatacgggaaccagactgtagcgccctacagcgagcagttctatattgggggagccaacagtatccgtgcgtttacagtgcgctctatcggccccggttcttatcgtcccgaagataaacagtatggttatctggatgagaccggagatgtgaagctggaagcgaatgtggaataccgtttccctatcctgggtgatttgtatggggcagcttttctggacgcgggaaatgtgtggctgctgcgtgagcaaaagaatgaggaaggtgagaatatacgccccggcggtttgcttactcttcgtaattttgctaaaagtgtagctttgggtactggggtggggttgcgttatgaccttactttcctggtgatccgcctggatctgggtattgctcttcatgatccgtatgacaccggcaagaaaggatattataatattcctaagtttaaggatggactgggattgcactttgctatcggctatcctttctagaaatagggcttgatttgcgtcaaaaggagggaaatgattgatttatgctcgaatttgaatggaatgtagcttttttcctccgtattattttgtagctttgtaccatcaaatattcaattttaaataaataaactatgaaaccaactttatttttattggcggctggtatgggcagccgttacggaggattgaagcaattggatggtctgggtcctaacggcgaaactattatggattattctatttatgacgctatcaacgccggttttggaaaactggtctttgttatccgtaaagattttgaacaagattttcgtgaaaagattatttctaaatatgaaggtcatattccttgcgaactggtattccaggctttagacaatctgccggagggttttacttgtcctgcggagcgtacaaaaccttggggaactaatcacgccgtcatgatgggggctgatgtaatacaggaacctttcgcagtaatcaattgtgatgatttctatggccgtgactcctttcaggtgatgggtaagtttttgtctgcattgcccgaaggctctaaaaatacatattctatggtaggtttccgtgtaggtaatactctaagcgaaagcggtactgtatctcgtggtatttgtggaactaatgcggataatttgttgacttccgttgtagaacgtaccaagattcagcgcatagacggagaagtgaagtatattgacgacaatggcgaatggacagctacccctgacacaactccggtgagcatgaacttctggggctttactcctgattactttgcttacagcaaggaattctttaaagcattcttgagtgatcctaaaaatatggaaaacttgaagagtgaattctttattccgctgatggtggacaagctgattaatgacggtactgctaccgttgaggtattggatactaccagcaaatggtttggagtaacttatcctgaagaccgtcagagtgtggttgataagatccaggcattggtggatgccggtgaatatcctgcgaaattattttaagatgagaggtagtgtggtcacacttatataatttactttcggggctgtccgttttttttcggacagcccccgttggattactatttcttatcttctgtttttattattgcatcttgtattcgctgggagataacccggtatggtgcttaaagtatttgccaaaaaaggaagggttcgggaaattcataaaataggctacttcctgaatagacatgacggaatatttcaacagcgctttggcttccagtatcacatattcgtcaatccactctccggcagtttttccgcttactttctttactacggtggagaaatgtttgggactcaggaataattgctccgcgtaaaagtctacgcgtctttctttgcggtgatgttcagtcagcagattaatgaattgattaaataatacttcttctcttttcagtgatttcggattttcagaaaggaattccggctgtcttctatgaagaatagaacctatcttgtataaataggctcccatcagcctacgtacgatttctgttttgaagttatcgttccggcttactgtttcttctatgagttgatagaaggatttcagttcctgcacttcttcttctgtcaaatggaatttgggattctctttcaatgagatgaaaaatggcatgaaactgttcaggttgatatacatctcttttaagaaatcagatgatattaaaaacatttgtgacaaatgaatgcccggtgataacatggactgtagaatatcgccgggagcgcaaataatcagatcgtttttctcaatgtcgtattcccgtaaattgatattgactttggcagagcctttttcacggatagagataatgattccatccagccgtaatgggtatttaaagatggggttcatattctcggggatgtaatgttcgcttctatccattacaaaatcattgttaatcccttttaaacagggattcatctgtcggatacgggctatggatatatttcctatttcatgttccatatttcttaattttgccccaaatgtataaatcaaaaatcaataatccattctttttttctcataatattattttttaaatgaaattgacggatgtgaatacagaagagcttgatggcagaaaatcttaattctatttaaaagggtgaggttggcaaactgtttgtacataataacatgtatatttaacaacaaaattataaagaacaaaactatgtcaatgtattggatcttatttattggaatcgcggtaatcagctatattgtacagaatagtctgcaaagcaagtttaaaaaatactcgaagatgcctttggctagtggtatgacaggaaaggatgtggctgaaaaaatgttacatgataatggtatttatgatgtgcgtgtaaccagcactccgggtatgctgaccgatcattataatccggcaaacaaaacggtgaaccttagtgaaggggtatatggaagtaacagtgtagctgctgcggcagttgctgcccatgaatgcggacacgccgtgcaacatgcgcgtgcatacgctccgttaaagatgcgctcggctttggtacctgtggtgcagttctcatcttctattatgacttgggtgttactggcaggtattttgatggtgaatactttcccgcagttattattggcaggaatttgtctttttgccatgactactcttttcagctttattacgttgcctgttgagatcaatgccagccagcgtgcgttggtatggttgagcaaggccggaattaccaattcatataaccatcatgcggcagaggatgcgttgcgttcggctgcttatacctatgtggttgcggcacttagttcattggctacactgatttactatataatgatttatatgggacgtcgcgactaagaccttataagggaaatatatttttattataaagggctgcctgtgggcagccctttctggttatattttgatttgtttcgaaataatttttgttttaatctctttttcttttcgttttaatttgtatttttgtcccgtcagcaaaatgagataatacctatgaaaaaacaattactgatctttttaacaatttgttgtttcccgtttatgctaaatgcacaaatgccggaacgtactcccgagaatattgcaaaatacaaagaattgtgccgtgctcatatttataaagatatgaaaggcatgtatcgtgaagccggaggagctttagtctttccgttccttgctccgggaagtaatcaatacttggatatgctatgggattgggattcttggttgagcaacatcgctctgcgtcaaatcttattagagaacggcacggaaaaggataagcaggaggccctgaagtatgaacagggatgcatccttaattccttgcactatggaggtatggacggttggattcctatctggatagaacggaatgcccctagccgcgaagagatgttgaaaacacggaacccttggaaaagcaatatgcacaaacctacattggcacaacatgccgcctttattgtccgcaatatgaacggggatgcggagtggttgcgcgatgatttttatacgttgcaggcatttgtctgtaaatatttgaattttcatcgtcacaaggcgaccgggttattctattgggaaactgatgaggctatcggagttgataatgatcccagtactttttatcgtcctcaaggcagttcgggatccatcttcttgaacgcgttgatgtatcgcgaattacaggctatggcatacttggccggctgtctgaatttggatgatatagcagtttcctttgagaaagaagcggcggtattgaaaggaaaggtacaagaacattgttgggacccgcgtgaccgtttttattatagtgtggatttgaatctgcttccggtggagaaaccggatataaaggggctgtacccgggacaattgtttctgcacgtagggcagccgcgtgattatgattgtttgattcagcgtcttagtgtgtggagcggatttatggcgatgtgggctgaaatagccactccggagcaagcaaaggaaatagtgcggattcattttcatgatacttgctcctttaacgctccggcgggaatccgtactttgtctcctttggaaaaaatgtataatgtacgtgccagtgggaatccgtcttcctggcaaggtccggtttggattaatgtgaattatctggtctttcgtggattggtgaaatatggatttacggaagaggcccgggaattggcggaaaagaccattttgcttttgggacgtgactatgaacgtttcggggcattacatgaatattatctgcctgataatggtgagccggtattgaataaaggttttcagaactggaatttactggtgttgaatatggctgcatggttggatgggaaaccgttcgttactgaattctaggtatgaagctgcctcttgacatagagcgggaattaattcggaaacttataaatggagacaagattgctttcagccatcttttctctttttataagtcccaggtcctttattattgtgtccattttgtcaaggataaagagatagctgaggatataacacaagatatttttttgaccgtttgggaaaagaaggaagatattcggattgagcagtctttttccgcttttctttatactatagcaagaaatcgtatttacgatatatttcgttctctgtctgcccgatctgtgctatacgaaaaactgatggaacaggccattgattatgtagatgatgtagagaagagtctggaagaaaagaatattcaggaattgattgcacaggctttggaacagttgagtccgcgccaacgggagattttcgaattgagccggaatagaggactgtctcataaagaaatagctgaacaacttggcttgtctgtttataccgtgcaagatcatataaaaaatgcattagagaaaattcgtgcttatctgatccctttcataagtacctgtccaatacttgtaagcctaatcatattaaaatacgttaaaccataagattcctatccccaccttttgcttttgattcgtatcctttatagagaaacgaaagaaatgcataatgaaagaaaaacaaaagatacattattcggtttggaaaagatttgttgacggtatttatacctgtaaggatattgaggaactgttggcagacaaaaagacagaccggtcaaaagactttgatgaagcttctgcttgtttatggaaaactggtgaggaagagtcttcatcctcatgggaggaatggattttcaatgagcgtcaggcacttcaaattatcagcaattacgaggacaggcgtcggagtcactctatctatttagtaaaaaaatgggggagcattgctgcggctgtattgctttgcatcgttttgagcgtagtttattttgctaatccggcagacatgaaggttgctcaatatgaaatacacgtaccttatggtaaaagacaaaaagtggtgctccctgacgggacaaaagtgatcttgaatgcaggctcttatatgaaatatccgaggcagtttggaaaagaagaccgttacgttcatttcaagggagaggcttattttgatgtagctaaaaataaagactgtcctttcattattcaaagtcaggattataaaatacgtgttttgggtactacttttaatctgaataattatgaagatagtgaggaactgcaactgactctatgcacaggaaaggtgctgatgaatttcggcgaagaacaattgaaactgactcccggagagcaattggtattggataaaaccaatatgcatctggaacgtgagcatgtgaatactcaaaattatatgttgtggatgcagaacaagttatactttaaccgtactccgatacaagaagtgacgaggaggttggaacgggtgtataactacactatacaattggactcaagttttgtctttaataattttctttcaggtacgcatgataataggagtttggaggcggttttggagtccattcgcttggctacgggaattaaatacaggaaagaaaacaattcgtatattctatataaataataccttaataattaaataatcaagatctatgaaacaacatgcgaagagggcttcgtgggcccgagtattgcttgtaccgaccttgttgctaggttcggcatccatggctgctttccctgtgcatgcagcacaagttgaattgaatcagactgttacattgcagatgcgtaaagtaaaattggctgatgtgttcaagaaactgagtaacctttccggttatgagtttttctatgatgagagtgttgtccaaaagtataatacgattgatattgatttggacaatgtaagtttcgaccaggctttagagcaaatcaggaaacaaactagtctgcaattgagcaaggtgaataataccattgtggtgagtcttgccaaacaagtactggcatcttccggtaaagtacaggcttccaggcatagagtcaccggtagagtaaccgatgctaataatgaaccgctgattggggtaagtatagttattcaaggaaatagcggaggaactataacggatattgacggacgttatacgttggaagaagtggatgccgatgccactttggtcttctcttacatcggttatgttccacagaaaatagttgtcggaaatcagcagacattgaatgtacaaatgaaagaagacaaccagactttggaagaagtcgtagtaataggttatggtgtgcaaaagaaaagggatatgaccggttccattgcttctattaaaagtaaggatatcacagctattcctactaccaatgccttggaggcattacaaggaaaagtagccggacttgatcttacaaactcttcggggcaagcaggaagcacacctaattttacgatccgtggagagcgttcattgacggctagtaatgctccgttgattcttgtggatggtattgattatggtacctcgctagatataaatcccactgatatagaatctattgaagtgttaaaagatgcctcttctacagctatttatggaacacggggtgcgaatggtattattatgattacgactaaaaagggaaaagaaggaaagtcaaaagtatcctttaatgcttttgtttcttctaccatgataactgattatcctgatatcatggatgctgaagaatatgcccaatacaaaagagaggcctatcgggacagaacaacaggaaaatacgcagaggatgctgctgtatttgctcctgaagaactgacttatctggaaaaaggatatgatacgaactatcgtgacatgttgatgcacaatggatttaaccaaaattatgaggtgtctgtatccgggggcaatacgaaaaccaaacataatatatctttgggttacagaagcgaagagggactctttaaggatgataattataaacggtataatgctcgtgtagcactggaccatcaattgtttgacaatgtgcaggtagggacaaacattatctatgcctatgtagataagaataatcgttatagtccgctgaatatggctaataaaattgttcctatctcgaaaccttatgatgaggaggggaatttagtgatgtatccgtctcccggttataatactcagatgaatccgttgattgacgatcaggagggcatgcgtgtggataataccatccaggagcgtttcttcggcagcttgtacctgaactggaatatcaccaaggatattttattccgtacaacgctgggattgaactcagtgaatgtgcgtagaggctttttctgtgataagaactcgttgcagggaagtggcaaggattcacaatcctataaggagcacaccatgacacgtaatctgacatgggagaatgtgctgacttattcaaaggacttctctgatatccatagtttgcaggcaatggttggaaccagtacgattctcaactctaaagaatatacctatgcaggtggaaagggacaagtatatgctgataactggttccataatttgtattccaatgaaaaagaaatcactataaagagttcactggttgatcaaaatctggcttccttctttgggcgtgttaattataaattgatggatcgctatatgctgactgcttctttgcgtgccgatggttcttctgtttttgcaccaggtaagaaatggggctactttccgtctgtagcactggcctggcgtatcaatgaagagaatttcctgaaaaatgtggatgctatttcaaatttaaaactccggttgagttggggacaatctggccaatgtgctattgatccttatcaaaccgttggtttgctgggtaactccacttattcgttcaataatgagggagcttatggattctatcctaaaacgatgtcaaacaaggaactgacttgggaaactaccacgcagtataaccttggtctggatttcggattttttaataatcgtatttcaggtagtattgatatttacaaggcagaaacccgggatattttaatgaatcgtgtaattccatctattaacggttatgcttcggttatggaaaatatcggtaagactgaaagtactggtgttgatttgacactgagcacggttaatattcaaaacaagaacttctcctggttctcagatttctcattgtcacacaatagggaaaaaataaaagaacttgcttcgggacaattaaaggatgaggcgaatgcttggtttgtaggagaacctttcaaagtgttttatgattataagaaagaaggtatctggcaattgggtgaagaggctaccgctgctgccaatggacaggaaccgggtgatataaaggtacaggatgtggatggtaatggtgtcataacgacagatgatcgtatcatttacagtcagcgtccggatgtaacttttggtttcaataatacgtttaattataaggggtttgatttgtctgtattcttgtatgctcgtttgggtcagtggattgcgtatgattataatactacgtatcgtatcaatgcgttggaaaatggtggaaatgtagattactggactcccgagaaccctaccaatgcttttccgcgtcctaataaaagtaagagttatacacaggttacttactattcaacgttgaagtatgaagatggttctttctttaaaatacgcgatattacgttgggatatactttcaaaccggaacttttgaaacatctcaatctatccagactccgtgtatatgctacagcaaagaatttctttactttcagcaagattgataattatgatcccgaacagggaggaagtatttctttccctatgacaaaacaacttgtatttggtctgaatgtagaattttaactggtaaagaatgaaaattatgaaacgaattacattattatatgcattggcagctactcttatggtttgctcgggctgctctgattttttggaagaacacaatcgtagcgcggttactaccgaaggtggttattatgatactgagaaaggttttgagtctttgattaactcttgttatactcccttgcgtttttggggtggaaagtctgctgctatggcattcagtgaaacgggaacggatatattggctccgggcggcggttgtgattatcccgccattgtttcttatcagaatgattttgatgggaccaatcctatcagtaaagagtattatgaccgtttttacaaagcgatcaacttttgtaatacagccatttatcatgtaaagaatgttccgttcagtgataaggcacttaccagtaaacgagaagcagaggtgcgtttcttacgggcgtattattattggattctggtggaaacatttggagatacttattatacggatcagccatcggagtctattgttatggcacctaggaaaacctcggtttcagagatttatactcatatttttgaagatttggatttttgtatggatagccggttgtctgttgcgcaatcggatggagggcgtgttacgatgtgggctgccaaagccttgaaggctcgtttgctattgactagagcaagtgaattgaatgataaagcattgtatgaacaagcctatactttggcaaaagaagtgattgataatggcccttttgagttatcaaaggattttgcctcagtatttgatatggaaaattctgatggaaatggcaataaggaagtgatttggtatattgattattcttctaccaatcagttgtataatcaggagatggataatgatattattcgttcagggggtaaccatactcatttgattttctgtatgaagtatgatgaccagcccggtatggtcagaagcatagaatatggtcgtccttttaatcactatatgccgacacgttatttgctggattgttatgacgagaatatagaccaacgttttgaagtgactttccgttcgttatggaaggctaatggaggaaaaaccggagataactacccttatatggtacaaggggatactgctatatggataacaaaagatgttgttcctcaggtaaagcgtcagtgggccaaaggacgttatcagatacttgatcggacagatatttatcatgaagatggttctgtaaaaagtcagaaacaatgtatgcctatctctaaatttgaagaccctactcgtgctacggtgaacgaggatcgtggaacacgggatgcttttataatccgtgtggcagaaatgtatttaattgtggcggaagcaggagcaaaagtcggcaaggcggatgcgttggcttatatgaatattcttcgttcccaaagagctaaggctggcaaagaggaggctatgaaagttgctcaaagtgacattgaggatattgatttcatattggatgaacgtgctcgggaattggtcggagaacaattgcgttggtttgatttgaaacgaatgggaagtgaaatatttatccgtcggataaaagccggaaatcctgatgccggtaaaaatgtgaaagcttatcatatgttgcgtccatttccacaaactttattggacgccataacgaataaagacgaatttttacaaaatgagggatataaataggcttgtaggaaatagggtgaaaaggtagttaggaaaaatggcagctgttggttcttataccaaagttgccgtttttttctattttaaccttgtattttatgtctaattgataatttattctaggaggaaatctacatttggttatctttgtactttgtttggtaaatcgatataaaatggaaaacacaataaagttaaaatatatatggggcatcttgttgttagctcttcattttgtttttgtcaaaggacaaccgatttgtgttgcacgtcaatatactgttagagatggattgattcaaagtaatccggcgcagattcttcaaagtcataatggttttatatgggttagtacttggaatggggtaagccggtttgatggacgcgatttcgagacttttcagtttgattctcttttgaaccagcacatgcagcggctggagaatacggccgacggcaatttatggatgattgcatacgatcgtcatagcctgtatttatatgatattcgtgaaaataagctgattaatgttctgaaacagtatgaacaacattttaatactccgttgcaaatagaaaatttgtatcctttatccaaagggattacttgggttactttaaataatggaggatgtttcagaatttcagataaagagtgtactgtttcttcagggattcagtatattacagctattgatgatgtggaactggggaaagtcagtagggtctttgaagataaacagggagaggaatgggtatttagtgacaagggagttagcatatttggcaagcggaccattagttcatatcccttttctatgttcgaaacaatggataatcttgtttttcttgcatcacagaatggcaggctagcctattatgatgtaaataccatgcaattcaacatcgttccttttcaagagaagattcagcatataaacggaattaaagtgttgaaagataatcagctggctgttttgtctgataaaggtttgtacctatgccgtttccctgaactggcgatggagaaatatgatttctctcttccggggcatgacgatgcggctgtgagaaaagtctatcaggattctaaaggatttctatggatatttaccggattgccgggaattatccggcttgatccggaaaccggagtgaaacaatatttgaatactccttccggatacatggcttcttctccggaaaatgaactctttatttatgaagatcctaacggagtggtttggactattccttataaaggtatattcagttattatgacgaaaagagccgggagttaaaagtctattttacaccgggaaggaatcatataccttattctcctattattaaaacaacttatgttgacaaacaaaataatttgtggatcaaatcccagcgctcatttataaaaatgttctttccgcctagtccctatacttatagggagttggacaattattttgatacaaaatcatttctgtttgatagcgacgaacatttatggattgcaacaaagaaagggattatacgtattatggattcacagaaaaacttgctgggttatttgtcgcctgatggggaactggctcaaacggaaacagtttttgcagaaggtggaatctatgtcatgctgaaggatcaggcgcagacaatatggcttggcagtaaggaaaacggattgttcaggcttgttcctcggaatcgtccttatcattatgaggtatatcattatatgaataatccgtcggatccttattccatcagtgacaataaaatatcatgcattgatgaggatcataacggaagtatttggattggtacttacggtggcggattgaatttggttgaggaaaaggaagatggggcgatacgttttattcatgcggagaataaattgtccggttttcctattaatcgtaccaacagtattcgttgtatggtggagggacccggtcatactatgctggtgggtactatagaaggtttgattactttttcttctgatttttcggattacgaaaatattcgtttttatcttaaccttcctcgtccgcaggcggctgacgggttgtgtagtgctgatgtgatgtctgttttacgaacgacagatgaaactatctattgttattgttatggaggtggcctttgcaagttggtttcatcaaatttattatctgatgaacttcgattccggtcgttcggcaaagagacatctccgttggctagagccttgattgaagataaaaatcataatatatggatcggctcggaaacggatatcactctgtttgatgtgcacgatcagacttttgagtcttttggagaaacttttttcaatcgttcttttaattatagtgaatgtcttccggttgcagacaggcaaggggatatcttaatgggtacagaaggcggtatgcttgtcttttctccggatagtatcgttaagcagacttatgaagctcctattgtagtgacaggtataaaatattcggaggataatttatctcatgtattgagtgatgcggattatttagagattcctacccggcggaggaattttaccatctcatttgctgcgttggattatactaattccttggatatcgagtatgcttataagttggatgataatcaatggtattatataggtaagaagaactcggttagttttgtaagtcttccggcaggaaaatatcaatttcagataaaggcgaccaatggggatggtatttggatgaactctgtgaaaacggttactttacaggtattacccaccttttgggaaaccggttgggctaaggctttttatatagttgttgtcttggtgatatctttagctatcggatatatttttttctatatttactatttgaaacataaggtaaatatggaacaaagattggcggaaataaaagtacgttcttttattgatatctcacatgaactacgtactcctttaacccttatatccggtccggtatccgaagtgttgtcccaggagcctttgacttcccggacccggcatcatcttcaattggtgcagaaaaatatcaatcgtatgttattgctcattaatcaagtattggatttcagaaagatacagaataaaaaaatgggcttgactattgaataccgggatatcattatcatgcttcataatataatggataatttccgattgttgtctgaagagaaaaatataaatttttctcttcagacaacgttgccttctgtttttttgtggatagatagtgataagttcgagaaaattatctttaacttgctttccaatgcctttaagtatacaccggataacaagtcgattaccttgattgtgatggaaagcggacagtttgtttcgattgccgtaaaagatgaaggtattggcattcccaaagataaagtgccatccatatttgaacgtttcactacagtgtccaaggaaaatgacatgcagccttcatcgggtatagggctttcgctggtgaatgagttggttaaaatgctgcatggggaaattcaggtcgaaagtgaagtaaagaaaggaagtgtattcaaactggttttgcataagggaaaggaaatatatgctcaggataaaaatgttgaatatatattgaacgacacttcggaagaacaggaaacggtcttggcggaaccggaacaaaatgatgaaatatctttgccggacatgcctccggcaacaaaagaaactttagtaaaagtgatggtagtggaggataatgctgagttgcgtcaatttatatgtgaaatattgtcgggtacttaccgtgttgttggagttgccgatggagtgatggcattggaagagatagaagaggaagttccggattttattattacagatattatgatgccgcgtatggatggtattgaattgataaggcacatcaaggagaatgtcaatacttgtgatatccctattattatcctttctgcaaaatcgtctgttgaggatcgtattcaaggtttacaattagggattgatgattatatacctaaacctttcagcagcgattatttaaaatcgagaattgagaacttgatcaggcaaagaaaagtgcttcagtcggcttttttgtcaaaatatggtgctcagccgaagaaagaacctttagaagccatcgcttatcctgtgtcgcaaattgttcctttggatgagctgtttatgcagaagctggtagggtttatggaagagaattacagtaatccgggactgcgggttaatgatctggcagagttcatgaatatgagccgttctgtattcaatcggaaagtgaatggtatcatggggatttctccgatagaatatataaagaattataggttgaataaagcgaaaagttttatacaaagtggtatgtctttctctgaggttgcttttgccgtcggcttctctgatcccggttactttggcaaggcgtttaaaaaagcatttaatcagactttgactgagtataaaaataataactaagttccgttttgtgctgtttatgaaggtaaatagcaagaaaataccttattgatgtaagattttacctttggttctcaagggtaaaatctatctttgtgctcattgacacagtatgaaaatgttccggaaaacttttatgaatataattttttaaacatgataggatgagtacgaaattttatgtaatagctgtttggacgctgttaagttttgtggtaaaagtaaatgcacaagacaaagtggaatgttgggaccggtttgagttgagttttaaacaggtgaccaaagggaatccttttgatacacgtctttccgctactttcatttgtggaaaggaaaagaaaacggtggaaggattttatgatggtgagaatacttataggatacggtttatgcctgctgtcgccggggaatggaggtatgttacatcttccagtataggagctatgaatggtcggaaaggtacattcacagtggtacccgccggaaaagataatcatggcatggtgttggtggacggagaacataattttaaatatgcggacggtacccgttattatccgatgggtacgacggcctatgcatggacacatatgaaggaaacgactcaggaggctactttgaaatcgtttggtgaagccggttttaataaggtaaggatgtgtgtgtttcctaaaaactattctttagtgaaagacgagcccgcgctttatccttttgaaatggagaagacgataaaagataaggaaggaaatgaaaggaaagaatgggactttgacagatttgacccggctttttttcagcatttggagaaacggatagaccaactgaaccgtttggggattgaggcggatttgatccttttccatccttatgataaaggaagatggggctttgatgctatgtcgaatgaggtgaatgtacgttatattaaatatatccttaattccgcaacactattacaaatataactttttaagtacctgagcaacaaaaagttgctcaggaatttgccatgtcagatttttcacctatcttagtgttgcaaatcaaaatatgtatcaaacccgacagacatggcaaaggtagcaattaaatccgagaaactcactccttttggaggaatattttcaataatggagcaatttgactccagactctcatctgtaatcgactcaaccctcggtatgagatgcaggctgtatggttatcaatacagcgaaatcatccgttcgcttatgagcgtttatttttgtggcggctcatgcatcgaggatgtcaccactcatctgatgtaccacctttcgcttcatccgacacttcgcacatgcagtgccgacacgattcttagagccataaaggaactgacccaggataacatttcctacacatccgacactggcaagacctacgacttcaacacggcagacaagctgaatacactgctcctcaattgcctattgtccacagggcagctgaaagagggcgaggggtatgacgttgacttcgaccaccagttcatagaggctgagaagtttgatgcgaagcctacatacaagaagttccttggttatcgccctggcgtggcggttattggcaacttgattgtcggcattgagaacagcgacggcaacacaaatgtccgtttccaccagaaggacacgctgaagaggttctttgaaaggtttgaacaaaacaagcttattatcaaccgtttcagagctgattgcggctcgtgttctgaagagatagtggaagagattgctaaacactgcaagaccttctatatccgtgctaaccgatgcagttcgctctacaatgacatctttgccctcagaggttggaagaaagtggaattgggcggcattgagtttgagctggcctccattctcatcgagaaatggaaagggaaggcataccgtcttgtgattcaaagacagaagcggatagacggcgaactcgacctgtgggaaggagaatacacctaccgctgcatccttacaaatgactacgagtcttccgagaaagagattgtcgaattctataacctccgtggagggaaggaacgcatcttcgatgatatgaataacggattcggctggaacaggcttccaaaatcctttatgggagaaaacacggtgtttcttctgcttatggcactcatacgcaacttctataaattcatcatggcgaggcttgacgtgaagaggttcggactcaaagcaacaagccgcatcaagacgtttgtctttaagttcatctctgtgccagccaaatgggtcaggacatcaaggaagtatgtgctgaatatctattcatgcaacaatgcttatgccaatgtgttccagaatgactttggataacaccgacaacttatagtcgtgattttgcgtattgcctcaagtcgcatggtggggtaaggggcatttatatgtctttatggtgacattcgatgcactgtgccccctttttactaacgatgcagattcttttcgcttctgtatcatattaggcgcgtagttgcggatttgaggatatattactgcgcgtttggcttcttttagaaatgtatggtggtctatggcaaacgagtgggattatgtaaaagcgaaaactgtggacgattggaagctgttgacgaaaacagtggttgagaatgatccttatcgccatttatgttctattcatggagcgacggctacttattttgattattggatgcctgaatttacccatgtcagcatacaagatgaggcaccggtactgagttctaccgcttctgctactttaagaaaaatttatcgcaaaccggttatatgtgatgaggttgggtatgaagggaatctaccttatcgttggggaaggttaagtccgcagcagatgacttactttattttgaatggtttgttgggtgggatttatgtcactcacggtgaatgttatcagcaggggaacgaacctatcttttgggcgcaagggggatctttaaaaggtgaaagctggaaacgtgtgaaatttttgagaacgattcttgaagctgctccctatccgttggagatggcagatatcagtcgtgacttggttacttctactgctggaccagactattatctggtcaatatgggaaaagatgtgaaaggtttctggacttttaatctgccggtaaaaaatgcagattataacaaattgcaaaagaataaacggtttaaagtagagattattgatgtgtgggccatgactgtcacggaatatcctgtgatatttgaaacaacagaggaattggattatcgtgtttttgatatacatcatcggggagtaagaattccggatactccttatattgttcttagaataacagaggtgaaatgatgggataagccttctgacaggagatgattgattttttttatcataaaaaaggctaatagttttcgattctttttgttttagcttaaatttgcggtataattaactccctagatacactaaaatgttaaatacagtagaagaaggattggaagatattcgccagggcaaagtattgatcgttgttgatgacgaagatcgtgaaaacgaaggcgattttatcgtttcaggagaaaagattactcctgaaattgtaaattttatgattactcatggcagagggttgttatgtgctcctctgccacgttcacgttgtgaagaacttggtctggctccgatggcagaagaaaacacttcattgctaggtacaccgtttactatgtcggtagatttaagagggtatggctgtactacgggagtttctgctttcgaccgttcgtcaacaataaaagctttggtggcaggaaatctgaatccttccgagtttgctcgtccggggcatgtgttccccctttacggtgcggaaaatggagtattggaacgtaatggacataccgaagctacactggatatgacaagaatggcaggtttgaaacccggaggagctcttgttgaaattttgaatgaagatggtacaatggcgcgtcttccccaactaggtgagattgcagcaaaattcggtttgaaaattgtttccattaaggatattcaggaatatcgtaaaaaacataacctctaaatctaataaatatggcactcaatcaaagaagagtaaagatattgcatctgattcgtgaagacggacatgcaaaagttcaggaccttagtaaaattttcaatgtgacggatgtaacgatccgtcaggatttggaagccttggaacaaatggggtatatccaaagagagcatggaggtgcgtttctgaaaggagtagggtcgtttgccaagaccggacaattgttcaatcagactcatttggaggaaaagaaagaaattgctcagaaagctattcagtttattcaggagggggacagtataattcttgattccggttctacaactacagagatcgcaaagcttttaatgaattataaggacctgacagtcattactaatgctttgaatatagctttgattttaggtgagaatcatggtattaatctaattgttaccggaggtgagttcaaggctcctacactttctttgacaggaaaaatggcggccgattcatttaaagatatacgcgctaataaattgtttctagctacagctggtatttcttcggatatgaaactgacttatcctagtctaagtgatttggtcgtgaaatctgctatgatagaatctgccagtaaagtgtatctggtggctgattgttcaaaaataggtgtcagtgcttttgctagtttaggctcggtttcattagcaaatgctattattacagatagtactataaccgaggaggattttgaaagattaaaagaattggaggtcgaagtaatctgattcttactgaaataaaggtaatatgggtgattgagaatgttggaaaatacattcttgatcaccttttttatcaactctgatttttgcttccctatttgtccttattgtttgcttctttttttataactgttctgctgggtacaaaagagacgatcgaagagtcttatttatatagagatataaccttgttgacagaataaattaattgttccggtttataggttatatggaaatatattgttaatataatcaaattgaatttcattttatttcgtttaatgttggataattccggttgaattccgttatttgcgaaagaataagaaagtaaatgataataatatgcaagttgaaacgttagaattacaatcggaaaagaatcggaaacgattggttgagattgtgtataaagcaaaagcagggcacattggaggtgatctatcgtgtcttaacgtgcttacagcactttattttgatataatgcgtgtttggccggataaaccaaaggaaacgaaaagagatcgttttgtaatgagtaagggacactgtgtggaggctttatatgttactcttgaggcaaaaggctttatttctcatgagataaccgatactttaggtgagttcgggtctattttgtccggtcatcctactatagaggtaccgggtattgaagtaaatacgggagctttagggcatggcttgtctgtaggcgttggaatggcgattgctgccaaaatggataaagctgattataaaacgtatgtactgatgggagatggtgagcaaggggaaggttcgatatatgaagctgctatggcaggaaaccaatataaattggataatctggtagccattattgaccgtaatcgtttgcagatcagcggtacaaccgaggaggtcatgtcattggagagtatgcgtgaccgctggactgctttcggctgggatgtgttggaaatgaatggggatgaaatggaagatatcatccggattttccattctattgattatacgaataaaaagcctcatttgcttatctcccatacaacaaaaggaaaaggaatatcttatatggaaggcatcgcgaagtggcatcatggcgtacctacagccgaacaatatgaagaggctgttcgtgagatatccgaaagaattgaaaaactagaaaaagaaaacaatggcaaataatataatagcgtgcagaaagagctttacagatacattgctggagttggctcgtcaggataaagatattgtggcggttacaacagacgccaggggttctgttactttgggagattttgcaaaagaattacccgcacagtttgtagaatgtggaatagccgaacaggatgcggtaggaatttcagcaggtttgtcacatagcggaaaaaaagtgtttgtatgtggcccggcttgcttctatgtggcccgtagcttggaacaggtgaaagttgatttggcttacagtcagaataatgtgaagatattgggagtgagtggtggtgtcgcatacggtgctttaggggctactcatcatagtctgcatgatattgccgtattaagaacttttccgggaatgaatatcgttctcccctgtgatgcccgtcagacacgtaagttggtcaagctattggtcgattatcccgaaccggtgtatgtacgtgtaggaagagctgctgttcccgatgtgtatgagaatgatgattttgattttgttctgggaaaagctaatatgttgctggatggtacggacctgaccatcattgccgccggagaaacggtttatcatgcttatcaagctggtttgatgttacaggagaaaggcattaaggcacgtgtgttggatatgtcttccataaagcctgttgatgtggaagctatcaagaaagcggcagaagaaaccggaagaattatcactgtggaagagcatagtcagtttggtggtttgggagctattgtggttgagacgctttctgaaaatccggttccggtacgtattatcggtattcccgatgaaaatgtagttcatggaaactctcatgaaatctttgctcattatgggttggataaagaaggaatctgtaaggctgctcttgaattcatgaaaaaataaacatgtccttttaaaatctaatagtatgattagcaaaataattaccatagaccaaagtacttcggcgacaaaagctatgctgttctctgaaagttgcgaattgttgcatcgggtcaatatagagcatcagcaattctatccgcaactaggatgggtggaacacgatgccgaagaaatttataaaaataccatagaagctatacattgtttgctagagaaggaggaagtgaatgggaaagacatttcttattctcttgccatcacaaatcagcgtgaaacggtagttgtttggaataagcggactggtaaacctgtttatcacgctgtggtatggcaatgccagcgaggggcagctatttgcaaggaactgaaagataagggatacagcgaactggtacaacggaagaccggattacttatcgatccttatttttctgccagtggtgctaagtggatattggataacatggaaaatgcacgtgaactggcagaaaagggtgatttgttgatgggcactattgattcctggctgatttggaaactgaccgaaggcaggaatcatctgactgattatacgaatgcgtcgcgtaccatgctttttaatattcatactttagactgggatgaagagttgttgaaactcttcactatcccccggagtatgatgccggaagctttgccctgtgatgctatttttggagaaacaacgatagagggtttgttcaaatctccgatacaaatagcaggtgttttaggtgattcccatggagcattaaccggtcagatgtgttttgaggcaggtatggggaaggtgacatacggaacaggatcatctgttatggttaacattggagaagaggctgttactgctcctgaagggctggtcacgtccgttggattctcggctttaggcaaagtgtattatgctttcgaaggaaatatccattgtaccggagccactatcaagtggatggtggagaaattgggattggtggattcgttcaatcaaattgaaaccttagcgacttcggttaaaaacaatgatggagtctatctggttccggcttttaccggattgggagctccttggtggaaaccggatgccaaagctgccatctggggaatgacactgaatgcaggcaaggcacatgtgctgcgtgcgggattggaatctatcgcttatcaagtgaaggatttgatagacatgatgacacggcaggcaggtatcgaattgaaagcccttcgtgttgacggaggccccacgaagaatcagttcctgatgcagtttcaggctgatatgttgcaggctgtcattaaccgttcggaaatagaagaagcttctgcattaggggctgttgtcatgaatggctttgctcgtaagaaatggactagtttccaagaagctgctgccatgcgtaccattgataattgcattactccctgtatggaggaaaaggaacttcaatccttgtatagcggatggcgtgaagctgtcaaaaaagtaataggacagaataactaactgaatatatcgtaacttttaataccattagaaatgaaaaacaagaagaaaatgtgttttggtgttatcattggaacacgcgcttattttaactcggaattagcaaaagacgttcgcaaacaattgctggaaacactgacaaaagaagggtatgactatgtcattcttcccgaagacgctacgccgacaggcagtagcagtatcgaaacaagagaagatggcttgaagtgtgctaaattgttccgtgagaatcgggaacgtatagatggaatcattgtttcactgcccaatttcggttttgaaatcggtatcatcaatgccatcagtgtggccgatctgaatgtgcctgttttggttcaggcatgtgatgacgagaatgataaagttgatttggatagccgtcgtgacgcattctgtggtaagatttccgtatgcaataacttgtatcagtacggcattccttttactgataccacccttcatacttactctatttattctgatttgctggctgccgatatcaataaatttgcagctatctgccgtgtagttaatggtcttcgtcatgctcgtatcggtgctatcggtactcgtcccgcaggattccagacggttcgtgccagtgagaagctgttgcaggcatcgggtattacagtcattccggtagacctttccgagattttggctgctgcccataagattgaggataccgatgaggtattgcaggccaaactgaaagaaatcagacagtatgctgttgttcctgaacaatacagtgataagctggttttgcaggctaaatttggtgtggccgtagaaaaatggatggaggccaatgaaattgatgctgtagctatccagtgttgggactctttggaacaaaactacggttgtgcggcttgtgtgactatgagtatgttgagtgagaaactaattcctgctgcctgtgaagtagatattgccggtgcagtgtctatgtatgcgttgactttggcttccgggcgtccgtcggcgttgcttgactggaacaataactttgccgaagatcgtaacaagtgtgtatgtacacattgtggtaacttccctaaatctttcgtcatgaatgatcttaaactgggaaccttgggtgtattgggtagaaccttgggtaaagtacacactttcggtgccgtttacggtaaagtaaaacagggtgattttacattcttccgtatctcgacagatgatacgaagggttgtatcaagtcttatttgggtaaaggtgacctgactgatgatccatacggaatggatggttgtatagcagtaaccaaggtggataatctgcagccgcttatgaaatatatctgtaagaatggattcgaacatcacgtagctatgtgccgtggcaatgtgaaagatattctggcagaagctattgaaacttatctgaactggaatatctatattcacgaataatatcaataaaatatgatattagtagataattactttttggcaatcctctgctgtgtcatttgctgtgcctgttggggttcctgggcaaatacacagaagatggttgctgccaagcaatggagctttgaactgttttattgggatttgaccgtcggtctgttccttacagctttattgggggcggtgactttaggaagtatgggaagtgaaggccgtaccttttttcaggatttggcagtcatggactggtctagcattcaatatgcattcttgggcggtgttgtatggaatttcggcaatatatttcttacagcagccattgctgtagccggaatgtcagtaggttttcctatcggtggaggcttggcctggattggaggtattgtattcaattatttattaatctctttggccggtcagacctatcagggaaatcagtttttactatggagtggtgtgttagtcatcattatcgctatcttgatttgcggaaaagcatatggaaagttatcatccggtaaagcttccacacccaagaaaggtatcttgttggctattatggcaggtattgctatcatgttcttttatggattggttgtaaaatccctggatccgcagtatgtggccggtggaaccggaacattgactccttatacaggtgtgttcttctttgcggtaggtatattggttagtacaccgatatttaatacattcgccatgaaacatcccgtggaaggcagggtagtgaccatgaaagattactttgccggtgatgcaaagactcatctcacagggatgctgggaggttttatatggatgggtggcatggtgattagttttatgggagccggtgctgccaatccggctatctcatacgcccttagcaacgcggcccctgtggtggccatgatatggggagtctttgtctggaaggagtttaaagatgctccgaaaggaactgataaactgattgtggctatgtttgctttgtttattatcggcttaataagcataactttgtcgaattgaaatttgaatgaagagaaactataaaatagggcttgtaatgaagtcgttacaagccgattttttcaaagtgatgaaagagggggctattcagtatgcggcccctcttccgtttttggatttggtttgtgtgggaacggctacacagacagaggtaaaggaacagattgacttgatgtattctttgattcatcagcaagtcgatgccatcgtattggtgcctatagactcaaaggctttggttcagcctgcagtagaggctgtcaggaaaggaattccggtaattaatattgatattcagctggatgctcagctattggagcaggcaggagtagaagtggcttttgtgggaccggataattttgcggctgcgtatgaagtgggtaaattattgggtaagaagttgcggaatgaagataaagttgctattattgaaggattggcggcagccgataatgcgcggcagcgtaaaagaggtttcatcaaagcgatagaagaaaaagggttaagattggtggcgtccgaaccagccgactgggaaacggagaaagccgccgaagtctttcaggctatgtggatgcggtatcctgatttgaaagctgtatattgcagcaatgatgcgatggcattgggggttcttcagcaaatgcaagaaaaaaaatgctatttgccggtagtgggttttgataatgatgcggtaatgaaagaatttctttctacaggaaaactggttgctacagctgacattttcagttcacaaatggctgtccgagggattgagttcgctttggatgtactggaaggaagaatagagaatagaggggttcattctactgcctatgaaattataaaacaatgagtttatattgggaaacggcctatactgagatatgcacccaaagcaccggctgtttaacttcttaatatgactgacaatgagcaatattaagaagtattctttttacgaatgaaatatttagtgtaattttgtggctcaaaataaattaaatagaatcattatggcagcaaaaccaggtatacctaaaggaacgagagatttttcgccggtggaaatggcgaaacgtaattatatattcaatacgattcgtgatgtatttcatcttttcggctatcagcagattgaaactccttctatggagaatttgtctactttgatgggaaaatacggtgatgaaggggataagttattgtttaagatacagaactcaggtgattatttcaacggcattaccgatgaagaattgttgagccgcaatgcggtaaagctggcgagcaaattctgtgaaaaaggattacgctatgatctcactgtaccgttcgcccgttacgtggtcatgcaccgtgacgaaatcagtttccctttcaagcgttatcaaattcagccggtttggcgtgcggaccgtcctcagaagggccgttatcgtgaattctatcagtgtgatgccgatgtggtaggcagtaattctttattgaatgaagtggagctggtacagatgatagaccgggtatttggcaaattcggagtacgcgtttcaattaaaatcaataaccgtaagatattgaccggtattgccgagatcataggtgaggccgataaaattgtggatatcaccgtagctattgataagctggacaagataggcttggaaaatgtaaatgcggaattggcttctaaagggattcctcaagaggctattgataaattgcagccgattattttattgagtggaagcaatgaagagaaattggaaactttgaaaacagtccttgcagctagtgaaacgggaatgaagggagtagaagaaagtgaattcatattaaaaaccgtatctacactgggtgtgaagagtgaagtggaactggatttgactttggctcgtggcttgaattattatactggcgctatttttgaagtgaaagccttggatgtacagattggcagtatcagcggtggcggccgttatgataacctgaccggtgtctttggtatggacggtatgtctggtgtaggtatctctttcggagccgaccgtatttttgatgtgttgaatcagttggatttgtacccgaaagaagcggtgaacggaactgaactgttgtttgtaaacttcggtgataaagaagctgcttattgtctgcctatcctggcaaaagtccgtgaaacaggggtacgtgccgaaatttatccggatgctgctaaaatgaagaagcagatgggatatgccaatgacaagcagattccttttgtcgccattgttggtgaaaatgaaatgaacgaagggaaactgactttgaagaatatgactacgggcgagcagtcactggttacaccggatgagttgttggcagtagtgaaagcttgatctcatcaagcggatgttgtcggaatagtccggtatattcatccgtgattatctatgcggattaacagattatttttttttcttccgtcactatatctcctttagaatcagtgagatgtggtgacggaagttcttttttccctccgaaatggtttgttctcctttccctgtgtggagtcggcctgatagctaccggtcactatggcagatgtgtttagtacccctttttatattctcgtccggtttcttttgtaactttgtctgtcttcttttgttgtttcacctaggtgacaatgcattggcacctaagtggagaggcgtagtcacccaagtgatacgattgcttcaccttggtgaaactataaattcaactaagtgtttgcatgataaggccttgtaactgaagtaaatggatgaaccatcatgtaggacacatcaagaaggaaaatctatgagccttcagaaacaatggtaaaaatccacatacataccagttaaggggaattacggatccttttacaccgcaaaccgttgaaaataaatggtttgcggtgatagaaacaaaaaaaagaacagatgtctttttaatacgctatcttatccaatatcccgttcaagtgtgcaatagccactccataattagtcatgggaacctgttgcttacgggcattatcaatccggtttagtacatatttgcgattgaacatgcaggctccgcaatgaatgattaagtgatagggtgtcaaatcctccggaaagtctgtacctgcaacgatatctatttgtagctcttcgcctatctttttacgcaacatacgtggaagctttactctgcctatgtcctcggtggcaggggcatgagtgcaggcttccgctatcagtacccgtgactgtggggtgaggcagtctatggctgaggctccttctatataataatgtatatctcccttatatcctgccatcaggacagagaaagaggtgagaaggctatctgccggcttttgttcataaacggtatgaaaaacctgggagtcggttataatcagtttcggagggcgggacagagcctgcaaggtggaagctatttggtctgttgtacaactcatcaccaggcatttcttgtccaataattcgcgcatcgtctgtacctgtggaaggatgagacggcctttgggagcctgtatatcttgcggcatgactaagagcactaaatctccttctttagccagatctccggtaatggtttgttgtccgaaatctgccggtaacttttccagaatcgcctgatgtatcttctttatacctgttctttcctttgcgctgataacgagaggcttttgaccgcaatctttttctatacggagtagggtgggtgctatgtcttttcgtatgtcagccttgttcagtagcaagatgacagggatgtttttttcctccaattgcttcatccacttcttttcctcttcatgggcttcgtcttcacaaagaagtaaggctatgtctgtttgttcgatggctttcagcgtgcggatgatgcgcatttctcctaattctccttcatcgtcaaatcccggcgtgtcgataaagagacaagggccgattccttgaatctccatggctttgctcacggtgtctgtcgtggtaccggggatatccgatacaagggcagtatcctgtccggtcaaggcattgattaaagaggacttgccactgttgcgccgcccgaagagggcgacgtgcaggcggttggcagatggggtgttgtttaaactcatatgtggttactttatcagtctggaaacatctcccggcgcgtgggccggattagaatctgaaatctcgtttcccttcttctatctttttcaggttacgggttgctatttcttttattttcgggttgggaatgtgttccaattctttttttatcaattggattcccttggctcgtgtatccgctgtcgcataatcttccagatactctttcagtgtcatcaatgcattgggtgcacaacaattagcaatttgtcccgatttgactaatgacataaagcggtcacctgtacgtccttctcggtaacaagctgtacagaaactgggaatgtgccctaaatcgagcaaccagttcactacttcatccaaagtacgggtatcgctgatatcgaattgtgccgagttttcttccggtgtttccggaatggcataaccgcctacgctggtccgggaaccgccgctgatttgtgaaattcccagattcaagaccttacgtcgggttgcagccgattcccttgtagagataatcatgcctgtataaggaacagcaatacggattactgccacaatcttacagaatatctcgtccgagatggcgtccggaaagtcttgcgtggcgatatcatctgccggacaaatacgaggaacgctgatggtatgcggacctactccgaaagtggcttccagatgttcggcatgcatcaataatcctacaaagtcatagcggtaggtattcagcccgaataaaacacctagtcctacatcgtcaattcccgcttccatggcacggtccatcgcttcggtatgataagcatatttgcttttcggaccggtgggatgcagggcttcgtaattttctttatgataagtttcctgaaacaaaatataagtgccgatacctgcgtctttcagtttgcgatagttttctacggtggtggcggctatgttgacattgacccgtcggatggctccgtttttatgcttgatgctataaatggtccggatggattccaatatatattctatagggttccgtagcgggtcttctcctgcttccagtgccagacgtttgtgtcccatatcctgcaaggcaattacttccttacgaatttcttcttgtgtcagtttcttgcgtgctatggtcttattcttcaaatgataaggacagtaaacacatccgttcacacaataattggaaaggtacaggggggcgaacatcacaatacggttaccgtaaaacttatgtttgatttcctgtgccagatggaagatacgttctatcaaatccggttggtcacattccaatagtaacgctgcctcacgatgggatagtcctttgcatcgggcggctttgtcaatcagttgctctatcagagcacgattacttttgttgctgcgggcatactccagtgtttccagtatttcctggtggtcaatgaattcttccgctattttagaatctgctttatacatatttattagtggttagtgattataatcacctctatctgttgatatccggtaaccgattgtttccagtcgttgtgccaagtttcgtagaccttcggcggcttcggcgccgaaagctgctttgttgtcatacaaagcatatttttctctttgctcccgaggggagagattgggcatcactacattagctcctgccaatatccctttttcccgtccgtccggtgacaaggtggcaagggcggtggtcgatggaatcagggcggacgggtgcatcaaccggaaaagggataatagcttgagagtcattttcacacttccggccggttccattccgaatggtgtttcatggtgggggataaaaggacctataccaatcatctggggatggaactgttctatgaacaacaggtcttctaccagatggggcagagtttgtctcggactacctaccatgattcctgttccggtttgatatcctatttctttcagccattgcaaacattggaggcgatactttagtgacatttcttcaggatggagtttccggtaatgctgttcgttatgtgtttcgtgccgaagcaggtatcggttcgctcctgcccggaaaaaacgctcgtatgcttcccgtgatttctctcctaacgaaagggtgatggcacaatcggagaactcattgcggatggcggctacggttgcttctatccactcgtctgtcaaggcagggtcttcgccgccttgcattacgaaggtacggaacccgagtgcgtatccttcacggcaacattccaaaatggtttcgcgctttaatgcgtagcgggccacagcaggatttccttttcttattccgcaataatagcaattgttacgacatcggttgcccacctcgataagcccacggataaagatggcattcccgaaatgcgctaaagtaacctcttgggcctgttgttggagatacattaaagtatcagcgtcctgacaggtgaggagaatagcatattcttcgccggtcaagctatgtttatggcgcaatttatcaatcagttgcttcattcgtacttttttattaatggaaaacctgaaaagctcaccagctactgtaggggcggcctccatgcgtttgcctagtggcacacaatgaactttatacattcgaaggtgtgtcaaaatgatagattgttttcattttgacacacttccctatggtgaaggattgcgaataacgtctttccgctaaggcagttttctacttttaatacgtcttttcctgtttagccagttcttgtaccaactgacgtttcccgttactgccgctatgagtactgggtcctgtgatacaccctccctcgcaggccatcacttcgatgaactgtccgggagcttttcccgattttgcgtatgcacgtaatgttccgatattcttcttgtttaaatcagatacctgtatggcattgattttgtccgcttccattttcaggaatgcctttacggctcccatcacgccgccggcttgtgcaaacccatgcgcttcgcgaacagatgagaattccatggcgtatggctgtacaatctccaagttgacttcgaaagcatcgaaaatagaagaaacttcctcaaacgtcatcacaaaatccacagcttcatcacgttgggcctctttacgtttggctacacatgggcctacgaatacgatctttgcatcaggatacttctctttggctatacgtgctgcataatacataggcgaacctgtgccggaaacgtattttttcatatcgggaatatacttgttcaccagctcgatgtacgatggacagcatgaagtggtcatgaatttctgtccttcctccaacttctctatcagttcgtgtgcttcgtgttctacggtagacatggcgccttgtgccacttcaatcacatcagtgaaaccgatttgcttgaaagctccgtatacctgttcgatagttgtactgaattgacccagaatagaaggcgcgacaatagctactacctgttctcccttgcggatacgttgcaatacgtcgaaagtctgtgatatttcgaagatagctccaaaaggacaggcattcatacattttccgcaatagatgcacttgtcctcgtcaatgtgttctatgccatgctcatctttgctgatagccttgacagggcaagactcctcacaaggaacaggaatataaacaatagcatgatatggacagcttttgtggcagataccgcaactgatgcaagtatcgtggtcaatccatgctttacccgtgtctgcatgtacatgtacagctccctttgggcagttgtactgacaactgcgggcggtacatccccggcacaggtctgtgatttcataattgatttgtacacaagccgaacatgcctcgtctatgacacacatgatgttgtctttgggcttgccgttattggcgcggtccatggcacgtgcagcgtatccggacaatggggtcagttcgtcggtttcgtcgtccatatccagtcccagcagggggagtgatttatatttccacacggcgcgttccttatgtacgcagcaacgccctgcatgttttgaacgtcggggactgagctccaatggcagacggtctattttgtctgttgtcagttctccggttttccacagtttcacaagttctgtcagcaatctgtggcggacaatcataatgttgttcgtaaatgccatatagttaaaggggttagttattaggttttgcaaagatagtgatagtttgtgtcctatggaaatattaaaaaaagaaaaatcacattttcctctttttatatcctgaattcaaacagacaatgcaacagtgtcgaattcattgttagttaataatttatatttttcctttggggtcatgtaacccaatctttttctcggtcttgagtttaagatgttttgaacgcgcattacctgttcattggttatgtccctaaagtccgtacccttcgggaagtattgcctaatcaaaccattgctgttttcattggctcctctttcccacgagtggtatggttttgcaaagtaaacaaaaatatttagtttacgtgcaatttcttcgtgaaaactaaattcttttccattatctgccgttattgtatgtatttggtctctaaaaggttccaaggcatcgatggcagctttagttagcgggctggcatctttcccgctaagtagtcttatccatactagtccagttaccctgtcgtttatagttaatagtgctcctttgtgattcattccaatgactgtgtcaatttccaaatcaccaaaacgtactttcttgtctactatcgtaggacgcttgtctatgtccacgcggtttttgataaaaccacgtccattagtcaatgcacctctcttcttatgacttcttccccgtcttcttaaatgcttgtataacaacttatctccatgctttttatcttcccaaatatactggtagattgtctcatgagaaactgtttccaagccctttgttcgcataaacccagtcacttgttctggactgaaatctttctttatgagtatatctacttgaattttcaagtcgtccgtaaacttcacgaagtgctttcgtgaacgcattctggacatatacttagcctgagcgagatccggtttgtaaatgccattacgtttatcactattacgacgtaattcacgacttatagtgctacgatgaactcctacaagattggcaatctcggttcttgactttccgctttgcagataagcggaaatgttatacctttgttcttcggttagctgtttcatattgcaactgaatgttggggaactggaagatgcaaagaaacaacttttccacaggggaacaaaagggaaagaaatcttctttctctgttcctctgaaaaattattcttttcgtatcttctcattgtcatcattctcactcctgttgcattatccgcttgaacttaggtattcagatttgttctgtcgctgtggaatgtagccgactggtttatatatgaatctttataggtaaaaataataaatttcgtaaaagcaactgataatggcaggggaagaggaaaccattttagtgaaagatatgttatagctgtgccaatttggcagaataaaactgtcaatttctcctttttcatgtttggcacgtttttcgcaagatattttgcgtcactgcttaaagatgacggataattgatataattaaaagtataacatataaaaattaagaactatgaacattaaaccattagcagacagagtattgattcttccagctcctgcggaagaaaaaacaatcggtggtatcattattcctgatacagcaaaggaaaaaccattgcaaggtgaagttgtcgcaataggtaacggaacgaaagacgaggagatggtgttgcatgtaggtgatcaggtattgtatggcaaatactcaggtacagaattggaacatgacggtaagaaataccttatcatgcgtcagagcgatgttctcgctgttttgggataattaaatagtacattgtaaatcattaaattgtaaatagaattatggctaaagatattaaattcaacattgatgcccgtgacgaattgaagaagggtgtagacgaattggctaacgcagtgaaagtaactcttggtccgaaaggacgtaatgtgattattgaaaagaaattcggtgctcctcacattactaaggatggtgtaactgtggcaaaggaagtggaattggctgatgcgtttcagaacacaggtgcgcaattggtgaaatctgttgcttcaaagacaggtgacgatgcaggtgacggtactactactgctactgtgctggctcaatcaatcgtaggggtaggtttgaagaatgttactgccggagcaaatccgatggatttgaaacgtggtattgataaagctgttgccaaagtggttgaatctatcaagtctcaggccgagatggtaggtgacaattatgacaagattgaacaagtagctgcggtatctgccaataacgatcctactatcggtaagttgattgcagacgctatgcgtaaagtttctaaagatggtgtgattactatcgaagaggctaaaggaacggatactactatcggtgtggtagaaggtatgcagtttgatcgtggttatctgtctgcttactttgtaaccgacacagaaaagatggaatgtgtgatggaacatccgtacatcttgatttatgataagaagatttctaacttgaaggatttcttgcctattttggaaccggctgtacagagcggacgtcctttgctggtgattgcagaagatgtagacagcgaagctttgactacattggttgtaaaccgtctgcgttctcagttgaagatttgtgctgtgaaggctccgggcttcggtgaccgtcgtaaagctatgttggaagatatcgcagtattgaccggtggtatcgttatcagcgaggaaaaaggtttgaagttggaacaagctactcttgaaatgttgggtacttgcgataaggtaactgtttctaaagataatactactattgtaaacggtgccggtgcaaaagaaaacattcaggaacgtatcaatcagattaaagctgaaataaagaatactacttcagattatgataaggaaaagttgcaggaacgtttggctaagttgtcaggtggtgtagctgttctttatgtaggtgcggcttcggaagtcgaaatgaaagaaaagaaagaccgtgtggatgatgcgttgtgcgctactcgtgcagctattgaagaaggtatcgttccgggcggtggtgtagcttacatccgtgcttctgaagcattggaaggtctgaaaggcgataatgaagatgaaacaaccggtattgagatcatcaagcgtgctatcgaggaaccgcttcgtcagattgtggctaatgcaggtaaggaaggtgctgttgtcgttcagaaagtacgtgaaggtaaaggtgacttcggttataacgctcgtactgatgtttacgaaaacctgcatgctgccggtgtggtggatcctgctaaggtaactcgtgtagctttggaaaatgcagcttctattgcaggtatgttcctgactacagaatgtgtaattgtggaaaagaaagaagataaaccagaaatgccgatgggtgctcccggaatgggtggcatgggcggcatgatgtaatctttgccccataaatgattaacggactccctgttggcgaaatgttgacagggagtttttttatagaccatagtggattatctcctcaagttttatttactccctaaatttcggttcatccgagaaataatgaggagactgtcactcttgaaagattatgtggttttatttcaaattgaattgtcttataaaaaaaggaactgtttctgaatgttcagaaacagttccttttttagtgagcctcttgtcggattcgaaccaacgaccccgagattacaaatcacgtgctctggccaactgagctaaagaggcgttgctttttgtttagcgggtgcaaaggtaagaatatcttttaaaagaacaaattttttcataggaaaaattgttggaaattaccatttggtaatttttactccgaaataacgctctatctttgcatccgctaaacaaaaaagtgaagtttatgaaggatagtattgattttggtagtatggaaattccgaaattgtttcggaaattgctgatacctactgtgctggggatggtattttcggctgtgtttgtgataacagatggtatttttgtaggtcaagggataggtagtgacgcattggcggcagtgaatattactgctcctttgtttttgataagtacaggtatcggattgatgtttggtgttggtgcatcggtggtggcatctattcatttatctcagggaaagttgaaagctgcccgtatcaatgtgacgcaggctgttgtggtttcttctttgtttttggctgtgttgtggggagtggtatgtttgtttgctccacaagtagctgtgtggttgggaagttcggaacgactgttgcctttggcggtggaatatatgtattggtttttgccttttctggtatttagtgctttactaagttcagggatgttctttgtccgtctggatggttctcctaattatgccatgttgtgtaatgctattccggcagtggtgaacattctattggattatgtatttatttttattttcaaatggggaatgatgggggcggcgctggctaccagtctgggctatattttgggagccggaatgattgtagtttatttaagtcgcagaaaaaatgtgattcatttttgccgggtgaaacttagcaagaagagtatgcggctcacttggcgcaatgtgagatatatgtgtcatttaggagcttccacctttttgtgcgaggcggccatagcctgtatgatgtttgcaggtaattatgtgttcattcattatttaggcgaagatggagtggctgctttcagtattgcctgttatttctttcccattatatttatggtatataatgccataggacaatcggctcaacccattttaagctataactttggagcgggcgatgccatgcgggtacgctccgctttccgtctggcactgggaacggccgtgacctgtggacttgtgttttttgcgttaacagctttgttcaatcatcagattgtggctatgttcattgatcgttcctatccagcatacgatattgctgtggcgggactgcctttgtttgcgtctggctttattttttttgctgtaaacattgtttccattggctatttccaaagtgtagagcgggcacgtccggctatgatgattacagttttgcgtgggtttgtttttatggtactttgtttatttggcttgccgttgctattgaaggtgccagggatatggctggcggttcctttggcggaaatacttacttttttagtgataatggcaatttattatcgtaaacatcagtgggttcgcagatgattttttacctttgtggtaattaatcgggtggatatatggatgcattcatacagaagttttgtgagaaatatagtttgccaatagctttgagcttgcagttgttggataatatggagaagttcacttttcgtaaaggagattttcttgtacaggaaggcgggcggaactcaaacttctatattgtaagtaaaggaatctggcgggggcattaccttaatgacggggtagatgtttccgtctggtttgcttctgaaggggaggccatcttctcgtcatggggatatgtggaaaatacagcttcgttggtttctatcgaagcgatgtgtgacagtgaactttatggtatttcgaaggcaaaactcgaagtattatatgccgaatctgttgaactggctaattttggaagacgattgttcgaacagcagcttttagggcttgaaagttggatgataacgggaggaagcccccgggccaaagaacgttatcttactttgttggaagagaatccggaactgttgcagtatgtacctctgaagcatatcgcttcttatttatggattaccccacagtcgttaagccgtatccgtgccgaattggggagaaggaaaaaagaccaatgacaattttagcatttacggggttggttttttcgtatggaaacgcattgctctcttagctttttcttgtatggttcatccttgccttgatggatggtagaaaagttggtatccgataaatatttatcttaaaagtgtcattgcattttatttttgcgtaagtttgtagtgaatcctaaaaaacttatggcaatgatagatgatattttagagtttaacaagaaatttgttgagagcaaggggtatgagaaatatattaccaacaaatatcctgataaaaaaatagctattctttcttgtatggatacccgattgacggaattgttacctgctgctttgggcatcaagaatggtgatgtaaaaattatcaagaatgcaggtggggttatctcgcatccgtttggtagtgtaatccgtagtctgatggtggctatttatgagttaggtgtaaaggaagttatggttgttgctcattctgattgtggggcctgtcacatgaatagtaatgagatgatagaacacatgaaagcacgtggcatcaagcaggaaaccattgatatgattcgtttctgtggtgtagattttggagcatggttggatggttttgaggatacggagaaatcggtgaaagggactgtacgggctattatggagcatccattaatacctgaagatattatggtgaggggatttattattgattcggtgacgggtgaactgacaaaagtataaaatgtgagcttttttatacaatcatgttcatgtgactttgtgcattataagaaagagaggtatttctgcccgatgcagtatgtacctctctttttatggaagtctgtatttatttcatgtctttttattgagcgaaagcatgatgatatccatccactttgttccaattgccacgggtaaagtcgggtacggcaacaggtgcatttccgttttctatagaaagacgggtcaagtcggccatacagcaccattctgctaaatcataaacgtccatgtccagaggaagtccgttgcgcaagcaatataccaagcgataatccataatgaagtccatccctccatgtccacctattttctttgctgtttcttctaattcttggtggataggatgtttgtattggctcatcaaagtttcttttactttttcgggaacagccgagtgcatactcagattttcgtgatcgggtatgctggtgctgtcaatttgatccgggcggaaacaatattgctcgatgggatatttgttggcaaaacctttggtaccggtcagctgatacatacggctatagggacgcggattcattacatcatgttgtatgtggatggttttgccgttttctgtgcggataaaagtcatggtatggtcgccgttttggaaatcgggtgcttcttctttctgatattgttttaccagctcgggaccggttacagctttggtgtccatggctaccagtgtcttcatgcggtcaccgcggtgaatgttgagcaattggcaggcaggacctaggccgtgtgtggcataaacgtctccacggaactcccggttgtagtccaaacgccagttgttccagtaataaggccagaattcttccagattatggatgtatgaaccttctacatggagcacttcgccgaaaagacctttttgtgccatatttaatgtcgtcagttcgaagaagtcataaacacagttttcaagttgcatacagtgtttacgggtcttttcggaagtattgataagtgcccaaatttcatccagtgacatggcggcaggtacctcgatggctgcatgttttccatgttccatggcatagatacccatttcagcatggtgtttccagtctgttgcaatgtatactaagtcgatatcgtttcgctcgcacagttgtttccatgcatcttcgctgccagagtagagggcaggggcttccataccggcgttagttacaattttttgtgctttttccgcattttcaggcaataagtcgcaaagagcgacaattttagttcccggtatgtgcgtccaacgttctaccgcactgggaccacgcatacccaaaccgatgaaacctacacgcacagtgtcaagtttaggagttattagttcgattacatcctgttgtcccgcaggacgttcgggaactggaacttcaagaggtgcatactcttttgttgcagttgtttctttgggaattggggtacagccggcgaggcataataacgctataccgacgaagaaggtagataggtttttaatcatggctctattaattgaaatttataggttaatagtagatggttgcaaaaataggaaatatcgttggaaaaacctcataaaatcggcagattgcagcaactaaaattgattattaagaagttagtggcaaatcggagaaattgggaagatggtataaaacggtcttaaagcggattgcagcaggaaaacggtttcctagccgttacccgaaagcaatgcagatttaacacactccatttcgtttgcggcattctgcgtaggtttgcttatcaagagataattcgttaatttatttcacataaaagttttatcggaaattttacgtttctaaatatttccatgtgtctatctatatcacctaagttcaagcggataatgcaacaggagtgagaatgatgacaatgagaagatacgaaaagaataatttttcagaggaacagagaaagaagatttctttcccttttgttcccctgtggaaaagttgtttctttgcatcttccagttccccaacattcagttgcaatatgaaacagctaaccgaagaacaaaggtataacatttccgcttatctgcaaagcggaaagtcaagaaccgagattgccaatcttgtaggagttcatcgtagcactataagtcgtgaattacgtcgtaatagtgataaacgtaatggcatttacaaaccggatctcgctcaggctaagtatatgtccagaatgcgttcacgaaagcacttcgtgaagtttacggacgacttgaaaattcaagtagatatactcataaagaaagatttcagtccagaacaagtgactgggtttatgcgaacaaagggcttggaaacagtttctcatgagacaatctaccagtatatttgggaagataaaaagcatggagataagttgttatacaagcatttaagaagacggggaagaagtcataagaagagaggtgcattgactaatggacgtggttttatcaaaaaccgcgtggacatagacaagcgtcctacgatagtagacaagaaagtacgttttggtgatttggaaattgacacagtcattggaatgaatcacaaaggagcactattaactataaacgacagggtaactggactagtatggataagactacttagcgggaaagatgccagcccgctaactaaagctgccatcgatgccttggaaccttttagagaccaaatacatacaataacggcagataatggaaaagaatttagttttcacgaagaaattgcacgtaaactaaatatttttgtttactttgcaaaaccataccactcgtgggaaagaggagccaatgaaaacagcaatggtttgattaggcaatacttcccgaagggtacggactttagggacataaccaatgaacaggtaatgcgcgttcaaaacatcttaaactcaagaccgagaaaaagattgggttacatgaccccaaaggaaaaatataaattattaactaacaatgaattcgacactgttgcattgtctgtttgaattcaggtcatttaaaatatcttcaaatctctcaagattcgataaatagtcataacctcccgacctgttaaagttttcttttatttttaatttgccaataacttcaaacttgtctttcataagtgtcatatccttatgagtaactaatttaaatggaaatccaaaaaagaactctttttttccttcaaaaatttcaatggaatcattgctataagttctttgcctttgtgtttctgtcagtagtatggcattgtgtgtatgataatcccaaagtatgttgattttgggttgttgctttaagatttcttttctactcggtccacccattaggtgtccgactataaattcatcttttaacgtttcaattgttggtttttgttttcccttgtaggttgtaagtgcaaaatcataggttgtttgtgatttttcttgcgtgatttgtgcacaaattatagcacaataattgttgtctgaaagtttaaaggacagaacatcatttgattcaaaatatagattttttacaactctgtatttttttctatttctaacttttttgtttggtgcagatattttttctaaaaatcggtcaaggactttttgtctttttttgccttccttttcgtctacatcttttgtccaaagatttacacctgctttgagttcaataactcgtttcacttcatttaagatttcatcagtcagttctccgatttcccaaaatgccaaggcgtaagctgtaacaaaaatttcgtgataaaaatccgtttcatctccataatcttcttttatgaatggaatttctttcttaattatttcagcacttgctccattatcatacaattccattatatattcataggtgtcgtgtgctaaatctccatcaattatttttactccgtctgttgccatttcgattttatgtttttactaccccgcttgccgataaatatacgcactgaattatttaaaatacgcaatgcgtaaaaagtatattgcaagtgcgaagagttatctccccccccaaaggtactaattcttggggatacagacgttgttttccgtgtgaaactaatatcaacttactttgctttccttgattatcttgaaaaacataataaaatttatggaactttccttatgtggaaaagctactgccgttgattgacttctgccggaacatattgagattctcggaaaaggtattttcaaatatgtgtgaacgatgttccacttgtgcaatggttcaggcagaatgcgaatgaatggaggaacggtttggggactgcatctactaaacaggataaagaactgaaaatatagaatgcaccctaaattctattccaaaagtaaataaaagcattagaagataaaagattatcagaaaaatttccgacttttgtagtcggatagaggcaactcttttcaaaacatacgggaaaaaaagaagcgttatgtttatcttgtaggttggaaacgtaggaaatttcggacttggtacaagggatagcatagtggttctcacgccatagcgtgggctgctattatcatatctgtgccaaaggtttcctacgacctccaacttagacgtggtagcattgcagttccacgctctcgcattttataaccgcctataaagggactgataggcatcgaatagaatacatatatggaacaacagttttgtcaaagttgtggtatgcccctaactgatgaaaacagagggacaaatgccaatgggagcagtagtgaggattattgcgtgtattgttacaaaaaaggtgagtttacccaagatttcacaatgagccaaatgattgagttctgcctgcaattcttagaccaatgggctgtgcagaccgaatgtaagttgagtcccgtacaagcaaaggaacaaatgcttcaacactttccctacctgaaacggtggaaagaaaaagatgaacggacactaacggaaaaggcgacccacttgcttgcccaatgcgaaaatgtgaccatcgcatccattgatgccgacggttatccgcgacctgtgcagatgtccaagatacatgccaaaagttttaacgaagtctggatggcgacaagtgtcggctccatgaaagtgaatgattttaaggcgaacaacaaggcgggtctttgctatgcccattacggggatggcgttgccctgcgtggtacggtagaaattattacggacgatactatccgcaaggacatatggcaggactggttcgttcatcattttcccgatggaccaagtgatcccaattatgtgcttctacatttcatgggtacggaagccaccttttggataaatggcgaattttctcactccaacatctgatatttatgaaaactattgcacctgataataaaaacatagccgcttgcggtctttattgtggagcctgccgtaagttcttggcggagaaatgttccggatgtaaaccaaataaaaaagcaacttggtgtaaaatccgctcatgttgccaagaaaacaagtttaatacttgtgctgaatgctcccatgatgtcagggaatgcaagttgttttccaattggataagcaaagtatttgcatttttgtttaattctgaccgttctgcttgcattagctatattaaggaacaaggtgaacaagcctttgccgaagagatgacaaaacgtaaatgtcaaaccatcagaagaaaataaatatgaagaacgaggtgttatatctattgttaaataactatgctgaccatgaagccgtgttcctagcttcggctattgcgtgtgatgaacgtagtataaaagaaaatcccaaatacatgaacaaagtcgtagctcctacattggatgttgtacgctcatgcagtggtttctatactttacccgactattcttttgaaacgatgcctaatgattatgccgctttggtgctaattggtggtttcggctggttcgacgaactggaagcagataaagtcgtgccaatcgttcgccgtgccataaagaaggggattatcgtaggagctatctgcaacgctgcttctttccttgccaaacatggtttcttaaatgagataaaacatacgggaaatggtttggaacagctacaattatggggaggaggcaattataccaataaggcaggttatatgaatgagcaagctgtatcggacaaacgcattgttacggcaaatggcacaggttacttggaatttgctaaagagttgttgttattgctggagaatgatacccctgaacaaatagaaatgttttactgcttcaacaaagaaggattggtaaagctgttcagtcaattaccttgatagtatggatttgtcagattggttcaaaggttttgagaaaggtatcgctcgactctcatcggaacaacgagcagccttcttttcagaatgtagcaagaattgcgtggatggtggtgtgctttccatttacaggaaactctacaaggatgccaatggagatatggatgttttctttcagatggcagatgaatcgccgggagtaaaaagcgagattgtagagaaaggtcgtgtctatcatcttattttcttggaatgtacttgtggcttgtgtaaaaaaggatatgtcaccacacctttgctttgtgaatgttcacgtcagagtgttctttattctttgcaaaacctttggaaagaacagaaatttagagtaacactttgccattctattttgcagggtggacagaactgtaaaataaaaattgaattgacataggatactattctaccgcgaatcatgcagcaggtaaaaagaaaatgagttcatctttctttttgcctgctatattttactatatttgcatctgtaagagttacccaaaccagcaaagtgatgcagatcacggtaattaggatggttgccaactcattatcctaaaatgaggtgaattttctaactctcttgatttcaaagaggtatattctttttgaagaaatacaatatatttttaatgttagtgtattgcttgtcggataaattgatttcacttatactgtatttataacaaaaaagcagtcttgacttttcaagactgcttttttgttataattgtaattcaattccctcaatcaaaaagtacggttcttatttaggtctataaccatacattaatgcggcattaatttcaatagccctcatatattctttgaaaattttttttactcttttcatcctgctatccttttttaaaacattaaaaactaatcttttgtaccttttactttgtatcgtacccccaagcacggagggcgtcatttcccatatctttgagacctgctttgatgatctctttcaatttcttcataatgttatcctttctttgattaaaaaaatagggttattttcttacttaatccctataccccaagctcttacttcgttttcacccattagagcaagggctttcttaaaaatactttttacctttttcataatctcgttatcctttctttttatgttttacaacacaaaattatactgttttgttctagattgtactctgataaagataaaatgtatgcgaaaatggcaaattcttgacctgcatcaagaatttgccatttttgattaaaaaactatttcagaagcctagcttcttaaattcattttcaaaattaggtgtaaatatttcttttccaatattgctcctgatctcttctagtgaccaaaaacggccgccatccagttcctcgctgggaataatgggaccgtcataagtggttttatgcgagaataccaattctttttcccgggtggattcgaatacatagctagtcagtaattcgggagtaaagtcggtgatgcccagttcttcttttacttcacgtttcaaggctgtttccacactttcacccaaatctatgtgtccgcctacggctgtgtcccatttgcctggttgaatatctttccagtcaggacgcctttgcaaatagagttcgcctttactgttgaatacatgcaagtggactaccggatgtagcaatttacttccattatgacattctccacgggttgcagctcctgttatgtttccttgttcatctactataggaaacatttcttctttattatcataattcatcttcgctattttttgttactgcaaagatatgaattcggactcggattatatggatcttatagtttttaatagtaaaaagggatgtgaaatctttataatccgattccgaaatgccgtttaataatttacttgataccgttttaaaaaagctactgttttatgtatttccttatacatcacaatatcttcttttataaaaggtacctcgttgcggtaggtggcgagaaacttctcaataaacggtgaactacggagcggacggcggaaatctataccttgtgcggcgttcatcaattcgatggcaagtatatgttccagattatccatcactttgtagagcttggtggcggcgttggctcccatacttacatggtcttcctgtccgttgctggatactatagagtcgctactggcggcataacagtacattttattctggcttaccatgctggcagccgcatattggggaatcatgaaaccggagttaagtcccggattggcaactagaaattcgggcaatccgcgaagtcccataatgagttgtgccacacgccgttcggatatgtttcccagttcggccatagcaatggcaagataatcatataccaatgccaggggctgtccgtggaagttgccacctgaaatgataaggtcttcatcggggaagatagtgggattatcggtaactgaatttatctcggtcaacagtactgaagctacgtggttgatggcatctttggttgcaccatgaacttgtgggatgcaacggaatgaataggggtcttgtacgtgttgtttgggctgtacgatgatttcactgccttccagcattcttcggaatgcggctccggtttctatctggcctttatgcggacgcatttgttggatacaatccatgaacggatcgatgcggccgtcaaaggcttccagggagatggcggcaatgaggtcggctttcttggaaagacggaaggctttgagtatggcatacactccgttggcactcataaactgggtaccattgagcagagccagtccttctttgcttttcaatttgactggttcccaaccaaactcatcaagcacgctgatagcttcgcagcgtttacctttataatacacatcgcctacgccgatcaacggaaggaagagattggcgagcggggcaagatctcctgaggctcccaatgaaccgcggtcatagacaatgggcattacatcgttattgaaaaagtcaataatgcgctgtacagtgatgacttgtacgccactgtgtcccaaagaaagagcatgagcttttaataaaaacatcagcttcacaatgacatggggcatttctgcgcctacactgcaagcgtggctttttaccaggttctcttgcaaagtactcagttcatcggaagaaatattacggttgcacaggctgccgaatcctgtagtgatgccatagagagggacatcggattccttgatctttctgtccaggtaatcccggcatttctgaatccggtctttagcttcgggagccagttccaatttcagattttcattaataatacgttcgatgatgtcaaaagtgaggtcacccgaacctatttgatatacattcttcatggtctgattctttttttaaccgcggaggttgggattaaaacatggttttcacatagtccagtattttctgttcttcggcaatggtcgtctgttctatcatatcggcctcttcgctcatctctttgacgaatttttcgtctttgatagaagtgaggttgatacgtacattcagcaaggctcccagaatggcagtccgggcacacatcatggacacgcaggcatcggttacagcgttgctgttcccttttctggctaccacatcaatcatgggcagaatggaatggacggtacgtgccacctccataggcacttgggcggcatatttgctttccttctgtatggtttcactgcggatagccttttcttcatccgtttcttttggaagtttgaatgcggagaaaacacggtcgtatgcttctgaatcacggtctacatcggttatcagctggcgggtgagttcttcgaaacgaacagaaagatcttccataatttcgttcacttctacatatttcttgcggcctatggtaagattggctaccatagctgccagtgaggtggcaagggctccattgagtgctgaaacactgccgccaccgggaacaggatcattactgagtactttattgataaattctttgatggtaagttctgttaacatggctattagtatttaattggttaatttgaatttagaatacgtcctcctttgatggtcagcttgactgcgttcatacctgtataataaggtaatatatggggggtgtcggttcccagtaaaacaaagtctccctgttttccggcttctatgcttccgatgcggtcggcgcgtccgagagctgccgcaccgttcagtgtgatggctgtgatagcctctgcaacggtcagtttcatatagatgcaggctagagcaaaagtcagcgggatggaaccggagaaacaactgcctggatttagatcggtggcaagggctacggcacagccgctgtctatcattttcctgccacgggcgtagggctcttttagtgtaaaggcagttagtggcaatagagtggctactacattattttgtgccaaagcttttatgccttcatcggatgcttgcaacagatggtcggcgctgagggccttcaattctcctgccagttctgctcctccaaagctgacaatttcatcagcgtgcaacttggcaccgaagcctagagcttgcgcagctttcaataactttcgagactgatctacagtgaatacccctttttcacagaaaatatcgcaattttcggccaattgtttctgatgaatcatgggcaacatttcgttaatcagaaaatcaatatatgcgtcacttcgccctttgtattcttcgggtaaggcgtgagcacctaaaaaagtggtggcaatatctactttccggtcgggacattcattgataacttgcatgacactgagttgtttcagttctgtatcacgatccagaccatatccgctttttccttccacagtggtgacccccatccggctcatggtatccagaagccattcggctttatgtttcagttcttcaaaggaggcttcccgggtggcacgtacagtattgataatgcctccgccacgttccatgatgctcatataactgtcgccgttgagccgccagatgaattcgtcggggcgaaatcctccgaaaaccaaatgggtatgagagtcaacgaatcccggcaacaatacattccctctggcgtcaagtactttatagccgggcttttcatggcttgtacggttttcgccaacataggtaataataccgtcggttattcttaccgttccgcaaggaatgttgagaagttcgttcatggcttctcctttccgggcggttctgccttgcggagtaacgatgtgggcattgatgataatcaagttgttgctcataactttgttcttgtttattccatgatacgtgcttccagcacttgttgcatggagaagttttccaatcccagatagtaagaggcagtgtctatcaaggcctccataggaacaagtcctacgatttcgctgccgatgatgcttactccgtagcgtttggcttcaaaacgtaccatttcgaatgcccggtagatagcggttttactatagtcggtgagattcatggatacctgagtgataccccgatccttcagttccacgcccatggccttgcaatagcgcagtccgccaccgataaaacggattttcttggcaatgtcatgcgctatttctaggctgggagtattgagatttatattgtaggcaactaagggcatacgggctccgatggctacagttccagcagtggggtgacgttccgcaggaccaaaatcgggatgccattcgggttggtgaatcttttccttcattccttcgaattctcctttacggatgacagcaagattttcacgatgtggtgcactagctgatttttcatataagaatacagggagattatattgagaggccacccgttgtcccacttctttggacaccgctatagcatcttccatggtacatcctttgatgggaatgaatggaactacatctacagctcccatacgggggtgctgtccttggtgatggttcaggtcaattagttctactgctataccgatagcttctatcacagcttctttcaaggcgtccggttctccaacgacggtaactaccagccggttgtggtcttcatcgttactataatccaataattttacgcctgccttggcacgaaacggagatacaatctcgtctattttttgtaagtcacgtccttcactgaagttggggacgcattccataatttttgtccagttcataatatcacttatttaattcctttatcttttaatattttattgattaatgagtcttctgctagatgcggcagggtgatatgataaccatcggcatggctttcgttgaactccgccgaagtttccatggcatgagggttgcgtgcccacgaacggcgtgccactcctcccattacatcccataacatggatgagcggagaatacggtctacccgttcactgccgtcgcataccattccgaatccgccattgatggctttacctatacctacaccacctccattgtgcaaagcgacaaggctcatgccccgggcacaatttccggcaaagcattgcacagccatatctgccattacattgctgccgtccttgatattggaagtttcccggaaaggagagtcggtaccgcttacatcgtggtggtcacgtcccaacatgataggacctacctcgccccggcgtaccatttcattgaaacgcagtgcgatattcatacgtcccagtgcgtcttgatacagaattcgtgcttgggtccctaccaccaggttatttttttcggcgtcgcgaatccatatccagttgtccatatcctgtccgcggcgatctttagggatacactccatagcagcatggtcggtctttatcaaatcttccttttttccgctcaggcatacccagcggaaggggccgtaaccataatcgaaaagttggggtcccatgatatcctctacataggacggccagatgaatccatccttctcgtttgttccattgcgtgagatttctttcactccagcgtcataaatcgctttcatgaaagaattgccataatcgaagaaataagtgccccgtgccactagttccttgataacatggaaatggcggcgcaaagtttcgtccaccattttatcaaaagtttctctgtcttctttcagcatacgggtacgttcttcgaatgagatacctgcaggacaataaccgccttcgtaaacggcatggcaggaagtctggtcactgagaagttcgatgtggatgttgtgatgtagcgcatactccaacagattgactacattgccatggtaggctatggagcaggggattcgtcgggccatgacatcggtagccagccggtaggcttcagacaaatcggatgtgatatgctgtacccacccttggcggtggcgggtttctatgcgtgaataatctacttcggctatgatggccactgctccggctatctctgccgctttgggttgtgcgccactcattccgcctaatccggaggatacgaaaagatggccgttcaggttaccgttctgaggtactcctaatttcatgcggccggcatttaatagggtgttgaacgtgccgtgtacaatgccttgcggaccgatgtacatccagcctccggcggtcatttgtccatagttggctactcccatctgtgcggctatttcccagtctttctggttgtcgaacatgcctaccatcatggaattggtgataataacacggggagcttcgggatgtgattggaataagcccaaaggatggccgctttctaccactagggtctgttcattggtcattatctccagatactgcttgataagccggtattgcatccagttctgacaaacttgtccggtttcgccgtatgtcaccagttcgtaaggatagagggcgatatcaaatgaaaggttgttgtctatcatgacttggaatgctttcccttcgatgcaattccctttgtattcgtcaatgggctttgctttcaaatcaccttcgggccggaaacggtaaccgtatattttgcccctggtaagtaattcgtccgtcaattcgggagcgagttgctcatgcagttccacaggaatgtaccgcaatgcattcctcaacgccgtttccgtttgggcgggtgtcaagcggtagccccggtcgggagcgcggcggatgccttccgtgaatgtaggataggcaggtaagtcattggataaagtgatagtcatagtatgtaagtgttttgtcacaaagatagcaaaactactggaatactataagtttgaggatatgtttagtgacataaagttatataaactcagtataatatattgttggtttttagaaatacagcgatggcatgtgctatgggaggctctccggatttgttttaagtaaaataattattattcaatactaatagaatagtgataattgtcgcttacaggtatagtatcttcatagtatacaggtttagtctttatacatttggaaaacacgctgtgccatttctttcatttcttgacgtaaggtaaccggagccattacctcaacgctatcgccaaaggaacgtagaagtgaacgtaattcatagttgtcttgtactttcagtcgaacctcccatttgccgtcggcttgtttgctgtttagcacagattgggactcatgcagcggctttgttgtaatgtaattccacgccttgtcggtaacgtgcaaaatgacattttccacgggggcgccttcaactacggaaacgccgaccacgtcactaaagaactcttcaaaatcaaagtcattgtccagaggctcaaaggttcgggtcgtttcctttattccttcaatccggtctatcgcatagttggacattttatcgaagtctttgcgtttcgccaccaagaaccagcgattattgtactgtttcaagtgataggggctcaccacaactgttctgacatctttaccgaatggatggtaatttatttctattactttctttgctacaatagcttcgaatatgggcttgtaccatttgtctatacctgtaaggtattggttgtgctggaaactgactgccttttgagtctcactgcctagttttgaagtggtataaagtttcttttccaggtcatccagccagtcgaactgaggaacaccttcaaagcgtttcatgatggcggcggcttcgagtatacaatccatttcttcttgggaaggaccggattcggccatagtctttgaaccgactgcatagcggtaatactttttatggccgtcttggattctgtcgataatgactccgtacatcaattccatatcgttcatatcgtcaaagatttgacgacgctgtactccttcggcaccttttgaaccgctatcaccattctgtcgttcaagtgccatacggcaggcctcgatgagatcgttcatgtagtattttctggttctgctgctaaagcatttgtctaaagctctgtatcgagccatcgcgtttttatttgttgccatcgccttctgttttatgactgttttttattttggtacaaagtaaaatagcaactgtgcattcttgccgcacagctactataaatttcacttttccatgcggaataacgccctgtctgtcatggcataaagttttcaatgtcttctgtccggattagtctttctggtttattcgttatgtctggtttcgtctatgatttcgccgaatttctctgcggtttccttgatgtcggtgaactcagatcgtttcatgccgcttaagccggtacttgtccattcgctgaggtcatcagcaaaaacacctttgttcatacggtccagatagtttgcggataaaccgtcaggcatatttttcagatccatcatgccgatacgttgtacaaagtatgcataatcgccgtcgatgatgatgttcttgtgcgctgccatcttatagattgacatccaatgacgctttttggtgaatagcggagtgtaactttgcgctttcagaatgctgcgtttcaaaaggtccatcttctcttcttcgttcatcttgttaataggacactctgccaccttttggacaggctcatcctcttcggaattatccctgctgtaagtatccatttcgtaagaggctgcaggagctgaaggatacataacaggaacggtgactcccgaattgtcaagttcacaacctgccatttccaagtctgtaatgctgaccattacggcatagatatacatgctgaccaccatgtggatggctggagcaacctctgcatcggggagttccggagcatggtgaacgttttcgtttctccactttgaaatacacttgtagtaggtttcaaaagtgttcaatttcggatttttgccatgattatagtagaggttatctatttcatggaaagtctttacaatggccacccaaccgtctgcaccttttgtagacataaattgttctccctctttcaggtaatagagtttgcggaggaatgcctcatacttgggcaacaatgctgcgaatatcactttcaagtctaccggctcgttctcaccacgatagaacttgttcaattgatttggaatcatggtgttcagaccatccaagtttttcacagtatgggtcttcaagatggcgaaaagacaatcgagcacttcttcaagttcacgatagccgtgtccgcagagttcactgaaagtatcttctagtttctcaaacatcacatctttaagcaactcctcattatattcaagcacgttacttgtatggaaactttgccccaggaaggttaccagcatgtttaagaattcctcattgaatgcttggttgctgttgagcagtttcttcaagttgatatacttgcctaactgtgttgcgacttttttgttgaactccttttctaccatcttcaacaggctggaacgagagttttctgcgctgaatgcctgctttatgttggggtcatttctcaactggcgcagcaactcaaggatgatctggtcattttcgttaagaaaaccttcataaggctcgttcatcatgtggatgagatgatcgagatgatcaaactccttctccccgccgctaatgccagcagtacttggaggcgtcagttcaccatcttctccttctaatgtgatacagccctgttctgccagctggatacgatacttgtcgaggtcaatcttttccaagatgtccagtggcaaagtctccttagtataaggcaggtatttgtagtagagcttgcagaacatgtagaaacgttccaagtcagggtcaaggaatttcattaactgagcaagcaatccgtactggcggatgtaacggttcacttccttgcggatgagttcctgttcctcttcaggtaacggttttacatattcgtttaccagttgtcctaagatagatggaatgccggctatctgttgttcatctccgcagagcaataaggttaccaccttatctatatcgttctgtgtaaagagtttcctgcgctcgatgtcattcttatattcatagatgttcgacgggttatagttcccttgcaaccaggtcgtatcatagtagggctcgaatgcagcctttatgtcttcgtgtttgtttacgaagtcgataatcagggtatcttgcttgtcgggatggcagcggttcaaacgactcagcgtttggatgcactgcacaccgcctagctttctgtctacaaacatagtatggagtaaaggctggtcgaatccggtctggaacttgtcggctacgactaagaacctttgattaggctgtttgaattcaacggcaatgccgttgtctttgattccgaagccgtttattttctcctctgtatatttgttgccattgatttctacttcaccactgaatgccacaagtgcttttatctcgccattgtatttctctttcaaccggcgtgtgatggcttggtggaacaatatggcgttggcgcggctggaagtcactacaatggctttggcctgccctttcatcttttgggcagagtgctgcatgaagtagtctaccatcatattggctttgtagttgatgacgtatgggtgctggttcacatattgcatcatcaaacggagtgcgttctgcttttcgtattcaggtgtgtcttcaggaaggtctatcttgcttaccagctcaaacatggtctggaaggtggtatagtttttcagcacgtcaaggataaagccttcctcgatggcttgtttcatggaataggtgtcgaatgcctttccgttacggccatagagtgcaaaagtctgtgactttggtgtggctgtgaaagcaaagtaactgatatggccgctattgatgctgcgggcagcttgcagttcggccaacatttggtcttgcatattgttctcggcttcacggctctcaattccaaactcttctactgtttcacgaagttcattcttgtcggtgagaacttgacgcacattgtgcgatgcttgcttgccaaaggctgtatgcgcttcgtctatgatgacagcgaagtgtgaaccggcagcctccttcaacttaggtaatgcaaagctgaacttttgttccgtggagatgatgatgcggtgaccgccttctgctaatgcctttgccagattacgtgaacctttgcggatgtctttcacagtaccggctacttcttccattccctttatttcatcggcaatgttccggtcgagcacaatacggtcggtaatcataataaccgaatcgaataccggggtgttgtctacattctgaaggtttgccagttggaaggccagccatgacatgctctttgttttgcctgaacctgctgagtgctgcacgagataggtttgccctacacctttctcgcgcacgtcgctaatgatgttgcgtacgcaacgcaactggtgataacgggggaatatatagaacggttcacccttcttaggtgtaatgtgtttaatgaaatgctgaatgagatttagtaaagaatcagcttgcagcacctctttccacatatagcaggtcggataatctccttctacttgtggattcaccgtttccttgttgaatgggaggaagcgtgtattatcgccggccaactgggtggtcatcatcacccggttgttatccatggcgaaatggaccaggcaggtgcgaagcatacggttctgcgggtggcggttggtctgatattggtgcatggcgtttaccacagtctgaccggtagcttcgttcttcagttccagagtaatgataggcagaccgtttaacagaatgcagaggtcgagttcgttatccttatcgaagccctgcgtgctgtacttcatctggcgaaccacgctgaagatatttttcttgtagaggtggtcagcatcatcatcatcaagggtcatcttcggtttgaaagctgccaaccggatgcgtcggccttgcagcatgaagccattcttcaacagtgacagcaaactttcaccacgattaattttcgtgttgatagtttcaatcacaatgttgagcgcatcttgttcgtctgcgaaactttgagtgataagtttctgccacataggttgctcgcgcaaaaattgtaaaagcatatctgagtccaccaacttttgaatattgaaatcctttggtgtgcgttgattgtacatcttgcttcctgcaaggtattctgctatgtgtttctcaaagagagtttcgtttagtagttcgaagttacgaaaagagtgtaatttattggaaatgagcgtaggttaatcgctcatgatagtaataggttacgatttagttagttatctgctgcattattcttctgcgcgttgcgtaaccttcaaagaactcttcgtatgcaaaagtaacaataaaacgggagattttgatatgaatctccctgattttttctatctcatacaagtttttccgtaaaagcggctttattcgtcggtacaccatcgcccaaaaggattttgaacgaacgtgtgccgactactgcataagcggagaaaagggttttgcctcacgcctaaacgacagtttagactgatgaggcaaggcccatttcttttgtgcttatgccaaagaggtgcttttacggcttttcagattattttctttttcgctgttcttttgagccggaagcggaaagccgtgtatgaccgcttgtccataaatggaacaagccgtcacccacagcaggcaaaccgggaagaatggttttatcagcccgcccggacacgtctggccggacagataaaaccatacttccttgcaggtggtttgcccggtttcacgctcccggctatattctttttttgttggaggggatttcttttttcacggatttctcttttgaagttttctgtctaatctgcctctacttccgtttacctccattttcgcgtctttcagtgagccgcatcaggcagtcatttccgttctgggcgcaaaggtaactccgggatttgacgggaaagcaaggtcaagcctcctgttttcgggaaaaatctccagccctttgggtagtatttttcccgaaaaaccttgcattccctaatccctacctttttaagcacccgaaacgaaaacgaccgatgcgacagaaagacgcattaaaaaaatgtcggataaacgagaggcagataagatagtttgaaactcaactccctcagctcttgaatccgcattaaaaacaaaaaatcaaaaacagcaaagatatgacagcaacggcagatttcagacaagtggcgcaatacatggggcttacgatatgctccctaatcatgcgcaccgccctttgggtattcggcatcctttggggtgtcgtcagagagatagtaaacggagtgttccgagtggcgataggtgtaatagtggctatcctttccacaatcgtctttttcggcttcatcctttggttattcaccctttaatccttaatcgacatggcaaagagaagcagcaagacggcagcgcagcaatgcagatactacgaggtggacaacatatttgagtacatggtggaaacatacatcaacggcaacatatccgtgttccgtgaactctaccacgaactgaacaaggacgcacgaaaggactttacggacttccttttgagcgaggtagagccgacctattggagagagatactgaaacaaacaatctaaagcgacagcgatatgaaaacgacagaccatttcaagagaacgatacagatgtatttggagcaacgtgcggcggaagatgcgctctttgccaagaactaccgcaaccctgccaagaacatagatgactgcgtgacctacattttgaactatgtgcagaaaagcggttgcaacggcttctcggacggggaaatatacggacaagccgtacactactatgacgagaacgagatagaggtgggcaagcctatccagtgtcatgtagccgtgaaccatgtggtggaactcaccgcagaggaaaaggcggaagcacggcagaacgctatccgacaataccaagacgaggaactccgcaagttgcagaaccgcaacaaaccgagaaccgccaccaaagcgaccacccaacccattcaagaaccctcattatttgatttaggcttatgaaaccaagaacacacatacagcaggaagtcgcacatctgagcaagcgactaccgagattgaccgccacgcaaaaggcatacgctttccgccattgcttcaagcactacgcaatcaagagagcggacggcacgaatatctgtaccgagtgcggacattcgtggaagagcgaccacgaccttgcggataccctttgcggatgcacctgcccccattgcggtatgccgttggaagcgttgcgcacccgaaagagcgtcttcagcgagaacgaatacttctccattgtcaccaccagcaagcagtaccaagtgatacgcttcttcttcgtcaagtaccgatacaaggcagggcaagcagccgagtattccatttatgaagtggtgcagaggtggatttcacccgatgggaagacaacgaccgttgcccgactgcgtggtatgtcaatgttgtattatgaccaatggtctgaatacagcgacatggaagtgcgcaagaacaacagacttcacgcatacgatatagcacctgtgtgtacctatccccgacagcgtttcatccccaaactgaaacgcaacggcttcaagggggactatcacaacacactgccgtatgaccttttcacggctatcctttccgacagccgagccgaaacactcttgaaggcagggcaatacgccatgttgcgccactatatccgtagttcctttgacatgggacggtattgggcatccgtcaagatttgcatccgcaacggctacaccatttcggacggctccgtatggtgcgacaccatagacctcctgcgtcattttggcaaggacacgaacagcccgaagtacgtctgccctgccgacctcaaagcggaacacgacaagttggtggcaaagcgcaacctgcaaagggaacgtgagcggacggaacagcaacggcaaaaggcgattgaggacgagaagaactatctgaaagccaaaagtatcttcttcggacttgtgttctccgacaaccttatctgcatcaaggtcatagagagcgttgaggaaatggtagaagaagggcggatgatgcaccattgtgtgggtggttatcacaacaaggcaaactcccttatcctttccgccaccattgacggcaagcggatagaaacgatagaagtgtcactgaaaacgctgaaagtggtacagagcagaggggtatgcaattccaataccgagtaccacgaccgcatcatccggcttgtggaggacaataccggacttatccgtcagcggatgaacgcagcataatatcaacctataatatagaacaatatggaagtaagatttgaaagcatggtttgtttgtgggacgataaaatccccacgatgttccttgaatttatgaacctcctcactttttgtcagagtgaggagcagttaagggcaagtgtaaaggactttgccgagaagcatgaacttgacaagttcttcctttacggcttcggttcacaccatttctacctgcaccaacgctacacgggcaatcccgaaatggtgatgcagaacagagtgttgtcagtacatttctaaccatctaaaaacaacgattatgagtacacgaatgaccatcaacggagtaagtacctgcacagaagcaggaacggaaaaatacgagaaattccaaacgggtatcggcagacgcaagcggacacttgtgcaatacgactaccgccacacggacggggaattattctcttgtgtgaaacccacgttggacgagtgccgagccgcacgggacaagtggctgacggtaaaaagaggaaaggagggcaagcgatgaacgaagcaggctaccaaacgctgatagtcaagttcagcaagcccatcacggaattggacgacatctttgacgatgccgaagcgtggggagttgaaacccttaaaggatgggtagaggactatgagagcagtcggtttaccgccattgacagccatacggcagtcataacgagcgagtacaatatggagtgtgtgaaaacatggttggaacggaacacacccattgccgagaaaacagagttttgaacgtttgggcggtgcggacaccgcccaaacataacgcctaaaatacaacgaatatgatagcgaagacaattttggagcagataggtggcagacgctttgccgccatgacgggaagcaaagacttcatagacatgagcaacggcttacgcatgagccttgcgaggaacaagacgagtgccaaccgccttgacatcatctatgatgcaggagcagacctctataatatgcgcttctaccgcaggacgttcagcaaaaagacattcgagtgcaagacgaaggacatcgaaatgcacgagggaatatattgcgatatgctggaggaaatgttcacgatggtgacggggctttacacccgtttttgagaggtgggcggcaaaagccgccctactttctttcagtgagcatgatggcggacaaagaaagtagcaaagaaacctttgttccaatcttcgataaataaaaaaatccgcaagtggcaacttgcggagggaaatatatagagtcgttatttttggtggaaggggatgattatctcataacgttgaactacacatttctgcttcgttttccattccccccaacgctttgatacgtctaaacatttttgttgtccctttctgaattttcctaaaaattttcttcatattttcgctatactttttacggttaataactatatcttgcaatgcccttacgacacttacaatttgaagtgtattttggaaaccgattggcaaaaatggttcaacgatgtcaattaacgagaaaatccgaagattatttaatgataataagcaaaaggcgtgccaatttgaatatagcacgcctttatagtcaatttgtcagtcgctaaggctgatatagcagcgcgaactccgcctttctacgtttgagtagcatggcatggcgttttcccttgtagttgcaaaaagcgatatactcccgataaatattcctgtcgccagcctctaactttcggatcagcgtacttttgggtatctttccgctccccaaaagccgatatggaccgacattgtaggcgagcgtggcaagcaagagtgaatccttcccaaactgccggaacatcgcgcagaacttccgcaagtctttccgcagaagcgcgtccgcctgccgcttcgtcatggtgcgtgccgaatacctttcgcccggtaacaacttatgcccatatcccacatacgggtgatgtttttccgagtgccagccctcaaaatacttcgtgcatcgcaccgccctctcaaatggtggtagccggtagatagccgcctgcccgttcgttccctcatggtggctgtcccgtgcggacacggaacagaccgccagaagcgaacagaggatagccatgaatacacgcatcatcgtgtaaggggcttgaagtttccgatggggacaacagagatagccccgtcatccttcacgtttcggttgttgaagtcaaattccagctcgtaggaattgccaaaattgtcctccactaccacaatgaagttgtgcgcctcgtcaccttgcgccgtgtagtacaaccggaacttctcgttttcgagcaggtagcggtcattgggcaggaacgtgatgccgttgtccattttcagcgtaccttccccctcaaactggaaataccggatggtatagagggtgttggcgaagtcacccgtctttttcagttcacagcggatttccaccgtctgccccttcgtcaccttgttaggcacgggcatgatttccaccgtgaagggataggattgctggatgtccatgtcgtcgtcacacgacacaagcgttagcgacacggcggcgaacaggcagagtgccaacgctttgaagattgatgttctcttgttcttattgttcagtatgttcattgtcctttgatttttaagttattgttcattttattttttcgttgtcagttgcagatactcgttcaagtccttgcaaccgtcatagagggcggaacggtcatagacacgttccccatagtgtcctttcagcatttccaacgtgcgccgtccggcttcgtcacggtcgaggtaacagtctatgcacccgtaaccgtccagatacttcatcgccttttccacgttggcgacggagttcagtacaagacagtcgcccgtttccaatccgagcgtggcagcggaaaggaagtccatgaagccttcaaacacgctgcacacgtcagacggagagccttccactttgaccagcgacacatctttcggcggtacgcatcctttgaagaagcggctgcggatttcatatccacccgccacgttcgggaaaccgacggcgaaataccgcttgccacgcactccgtaattcagccggcagcaataccggaatgcaatgccgtaaggaatgtcccgttccgccagatagtccgtcagtggagaacgaagcagcgggacggcttccactccctcaaaggcaggttctgacggtttaggtaggaaagtcggtttgctcacttcgggaacaggcataggcatattggcggtttccgctatgaacttcacttgttccatgaaatcgttgcttccgataaactccccggcaagcgtgaagatgtcgccacctttgcccagaccgaagtcgtaccagagctgtttcgccacgttcacacggaaagagggtgtgcgctcactgcggtatggcgcacgataccacaactcgttgccgcttcttcggacaggctcatgccctaaccgtgcgaggaagtccgcaaggggtatctgcctcatggcgtcgatttccgtccgtaccatacggtgcgtcagttaatgatgaacttgacacccacgccccactgcgtatgaaactttctcgtgtcgccaccccacaggcaacgttcccggaggttggcgagcagggctatacggtcagccacgtaaaactccacatcgagcgtcagcgcaccgccgtagatgaaggcgtcccggtcatggagcgtggagccgtcatgcagcaccttttcgccccagttcaccgattcatatccggcaagagccgaagcccccgcatagacgaatacgattttacgcgcgtcggaaagtaccttgaagtagtatccgccctccgccgtgaactgcgccacgggtatcttcccgtccttgtaagggttgttcttcagcaggtactcgccgccgaacacccatttgttccccctcttcgtgtaggtggagagagccgccccgaaactgtacccgccgtcgttgccgccgggattgaagccgtccgccatgttcgccctgacctcgatgccctgcatcttcggcaggcatcgctgggcgtgcgcctgccccgtgaacagggcaagcgacgcgataatcataaataggcacttcttcatggtcagcgcacttgaagttcgttgatggtattggcacgtaccaagtcctcgttctcaaccacgaaagactggtggcgccccccgttcttctcgttgagttccaccacgaggcacttgtcgtcggggatagtgaacttcgccatcgtgaacaccgtgcgctcgctcttcttgcccggcacgagtgtggcgtaattctgcgcacggagcggcaggatgatctgctcctgtacggcggtacgcttcgccaccttcttgtccacgattttccatgtgatgtaatccacatcgaaaggcacgttgctctggttctttatctccgtgtggaaataaagcaaaccattatgcgtgtagatacctttcagcagatactggatgccgaatcgcttgcagccgatgtgcttcacctcgcgcttgttctgcttgtggatggacttcatgataaggcgtaccagcatcgggctttcgctgcccagttctttcagatagatttcctgcgcgttgttcgggcggtttaccttctcgccgtcatggatgaagtcgcacatctccacgttgagcagcagcggttcggaggcgtacttcacgttgaatgtatagaaactcccgtcctccgttatcacggacatattggtttcgttcgggaagttcctcacggtcgctttcacgcggatgacattctccgctccgtcggctttgcccgcaatcaggtcgggcgaacctaaatcgacgtaacgaacctccgaggggaaaatgacgtggacggtcttgtcgtaggtcacttccaaaccgtgcgggggaaccatgcggtcgaaggtcagcttctttgtcagcccgtgatacaggtcaccgtccgcctccttctgcggatagacctcctttgtcaaggtcggttgttggctttgccttcctcctccttgcgaggcatagtcaagcgagcttgcctctgctctcgcttcgttcgtcggttcacttccgttgtccgttccaacggttacgttctcctgcgcgttggcagttacgatgcccatagcgagggcaaacatgatgattacttttctcattactttggattttattagtggtaaataaaaatggtttgttgttgctttttctgttttcaattcctgtcctgataaagcatgaccttgtatccggctttcagatgcaccttgacggtacgcatcttcttggcgatatactggctggttccttgtatcagccccttgcccaagtcggaggcgagttgcgcccctgcgttggtggagatattgatgctgctgcccagcgaaccgcccatgttggcggcaacctccctgacggcattcatttccatcgaattggggatgaagatgccgggctgcccgtccgtgtcatacacctccagttctaccgggataatcgtaccagcatattccaacgacgtgatttcaatatcaagccgttcgccctgaatctttgccgtgcctaccaccacagcgttgcgggggatgattttgtccgccaccgccatcggatccaacaggcggagtttgacagcctgcccgtccgtcacactctgcgccccatagacgcacgccgatatggtgtttttgtccgatacggtcgtgacgcccaccgccgtattgaaactgcggttacgctcttgcgagaaggaggcgacaaactcggcgttgctcatcggctgtgagagcgaggataccacctgatgcgccacctgcctgacaggtgcagccgtgttctttccggttttctgcacggggtaaggctctgccccctgtccgacaggtggctgtgtgccgttctgcccgcccatgtacttcgccgccagctcgtaagacttctccatgagtgccacttggtcatccatagcggatgccttgcccttctcgctttccaattccgattccagcgaggcgatacgctccaacagttcatccatttccgcgttgtcgttcttcggctgctcgtagaagttgccgagcgtggcattgaggtcgcggtaggcggctgcggaggattggatggtcttcggggcagacttcacgttctcttccgttcctccgggattggcaaggtcgaagtccctgccgccgtccgtttccgccacctcgcggtcgaacatatcgcccagttcctgcatggtgcgactgcggttctcctgccgttcctccatcgccccctgttcgtaggctttcgccttgtcgccgatgatctggcggttcgccttgtcagcgtcgggcatttcgatattgtaacctcccgttcccggttgctgctccttgtcggaagacggtgcgaatatcagccacatcgccccgatgaataccagcaccatagcgggcagcactatcattttctgacgtttcagcctttgggcttcggtcagcggcttgcgctccttcttcggtttcccgttgtcgggagccgccgtgttctcgtttttaggttcattcttcgtctgttccatataaataaggtattacgttatgattgttttccgattttacggacagttccacctgtccggcatggtctgtcactatccggctgccgtcattcctgccgatgtcatagacggctttgccgaaggtatagagggcaagcaccgcgaaggcggcgagcatcgccagcacgatgcgtttacgtgtcttcgggggcaagccgtccagatagcctttgagccttgccaccaacattttctttttgtcgtggagcttccagtacgcacgccaaaatgatttcttgatttttttcatgtccgttaccttttgatggtttgtaaatccttgttctcaatgatggtgaatccctcgatggtgaaaccgttgggattgtcgtccgaacgggacgagttcaagaggcggcacgtggtcacgaggctgcgctcggtaacgttgctctgccggatgatcttctgcgtggcgtaggtcacggcacggtagggatagccgttgaagtcgcacaccacgctgtccaccttcagcacctggttgatgttcccggcgatgatgcggttgtagtaccccttctcggcaaagtccgaatagtagttgtacacgcttttgtccgccaatagcagggcgcgtttcacgttatgctctatcgcgctcttttcaggcgagagtgtgaagaacagctcgtgaaagcgacgcacgtgttcccttgcctccgccggacggttctgcgacaagtcctgcgagagtgccagcatcagcgacttgccgttgtccagcacgtaaatcttttcccgttgccgctccgcgaagcggtaggaactccacacgctccataccgttatcacggcgcacaacgagaggaagacgataccgaacaggcgtatctgcctgaacgatgattcgatgtttttgagtgacttaaattccattgtttgattttatttttcggttcttaatcgtttttcaatcggattagtatgcgaccacttgctacatacgtatgtaatgggttgctacatacgtatgtgatgagctgttacataggtatgtaataggctgctgcatacgtatgtcgtgacgggctacatacgtatgttgctttcaggcgaataccaatcccgtaatacatacctttatttcagcagtttcccggcacgtccgaccatgtttcctgcggctgcacccgctacgctgcccgccatgcttccggctcgtcctgccgtctggttcacgttgcgaccgtagcttcccatacctccggcttggataatccagcctgccaccgtcgggatggtgaagtagccgatgatgccgattatcatgaagacgatgtacaccccgtcgctcgaatccagtgagaagtttgggtcagcctgcatccgctcgatgtcgctttgcagcatcagcacctgtattttcgccagtatggtgctgaacatatccgacacgggcagccacagatagacttgtatgtagcggcatatccattgcgtgagcgtgctttggaagccgtcccacaccgatatggcgaaggctatcggaccgagtatcgccagcaccacgaggaagaaggtgcggatggtgtctatcacgagagcggcggcttggaacatcagttccagtatttcgcggaagaagtcgcggatgcccttcttcatgttgtacattccgcgctcgatgtacatccccgccatcgtcaccatgtcgccgggcgaccagcccagttcctccagctgtttgtcaaactcctcgttcgacacgaggtaggctgtttcggggttgcgcatcatcgcctcgtattccagtttgtctttctgctcacggtatcggttcatgtccagcgtttccgtctccagcatcttcgccgtaccttgcacgacgggcgacatgatgctgtttatcgtgcctaataccaccgtcgggaagaacatgatgcacaagcctatcgcgaacgggcgcagcatggggaacacatctatcggttcggctctcgccagcgactgccacacccggtaggcgacgtagaacagcgcacccagcccggcgatgcctttcgccacgcccgccatgtccccgcatagcggcatcatctgctcgtagagcgagcgcagaatttggtgaaggttgtcgaaattcataggctaccagtatctttcgttcatgttcccgtacagccccatgatgcggtcgaggtcgttcttcttctttgcccgcaggtagctcacgctgatgttcttgttggtgtagtagctcacgaggttgcggtaacgcttcatcttggaatagcagcgttccaccacatccatgcgttccttgtccgtcatggagagtgtggtgatgttcaccacgttcctcagttccgtcagtacgtcgttggattcctccaacagcttggtgtagccgaaggcgatggctcccagttcctccaccgtgaagttgtcgtcacgcatcatcctctggaagctgatcacataggtgtcggtgatgtcacccaccatcaggatggtctgctgcacttttcgggcgtcttttaccagattgttcacggatttcagtgcgtcgtaatacttcttgccctgctcgtaaatcttcaccgtctcttgaaaattttttatcatattctgggcggtcgtggaagtgtgcaccacgttcttggaggtgttcacgatgctctgcgcgatgttggacgggtctatcaccgcccactgtgcgtttgccctgccgactgcaaacaggcacaggcagataataagtgtcattcttgttctcatgttactttggattttagtggatttcattatttattgctcgcctatcggatggtccggtttcgggttcacacgcacgtagtccccgttcggcgagaaggtcagtatgtccgtcgcctcgttgtaggacacgtcgatacggaatccggtgttcatgaacaggttgccgttctcctcctgcaagagataggtttccggcttcaatttgcggcggatgccgctccgcttgaacaccgtcaccttataggcttcaccctccttgtagataagcacgtcgggctttccctccacgctttcccagttcccgcaaagcaggtcacggcggttgttcgctacatcgcaggattgcagcaccatgaccgccagcccgattaaacacttgctgacttgcagcattttcgttcttgatatactcatacgcattttcttttttagttgatgaatctgtttctatttattcctttctccgcctttcggcaagctgccggatggcagcttcgatgtcgccgcccaactgctccgccagacggtaaacctctactttttccgtttcttcggtggtgtacgccagatactcttcagcactaacttcggtggcatagaccgccgactgcgtgccgcccagtcctatccacacttccttgtagagccttgacgggttgttagccatgttgatggagagtatctgcgacttctccttctccgtcagacccaacagggactgtatggcatcaaacttgttcatgtacttccgctggtcaaggagtatcttgcagtcggagttattgatgatgctctccttgacgacgggcgaggaaatgatgtcgtccacctcctgcgtcaccacgattgcctccccgtaatacttgcgcacggtcttgtacatatagcgcaggtactcagccatgttcgccgaagatagagccttccaagcctcttccactatcagctgtttccttacgcctttcagacggcgcatcttgttgatgaaggcttccatgatgatgatggtcacgaccgggaaaagttcgcgattttcttttatactgtcaatctcgaagacgatgaaccgcttgccgagcaggtctatgttctccgtggagttgagcaggaagtcgtagcgtccgccccggtaatactgccgcatggtggtgagcatattgtcgatgttgaaatcggacttctccacctttatctcacgttccgccagttcgcggcggtagtcgtcgcgcatatactcatagaaggtgttgaacgaggggacgatgctcctgtcagccctgatacgctcgatataggcgttcaccgcactgcccagttcgccgctttccgtcttcgtcactttgtcgtcctccgacttccagagcgtcagcagcaatgtcttaatgctgtccttcttctccacgtcgaacacgtaatcatcggtgtagaacgggttgaatgaaatcggtttctcttccgtgtaggtgaagtacacgccgtccgccccgtttgtcttgcgccggatcatctcgcacaagccctgataggagtttcccgtgtccaccagtaccacgtgcgtaccttgctcgtaatattgcctcacgaggtggttcatgaaaaacgacttgccgctgcccgaaggacctaacacgaacttgttgcggttcgtcgtgataccccgcttcatcggcaggtcgctgatgtcgaggtgcaacggttttcccgtaagcctgtccaccatcttgatgccgaaaggcgagagcgagctgcggtagttggtttcctccgtaaagaggcataccgcctgctcgataaaggtgtagaaactctcttccgcaggaaagtccgccgcattgccgggcatcgccgcccagtagagcgtcgggcagtcgatggtgttgtggcgcggcacgcactccatgcttgccagctggctgcccacatcgttcttgatatgtttcagttcctccgcatcgtcgctccacgccatgacgttgaagtgcgcccgtaccgaggtcagcccgtaggaatgggcttcgttcaggtactggtctatgtcgagtaggtcagcccccttacgggagctttcccctctaagaaccgtacgtgagagtttcccctcatacggctcaagcaattcaaaacttttatttgtaactaaaagccggctcatagtaacttccatttatttctgttagtaattcggctgcaatgatcatgtattaggactttcgcctttctactgctccctgtcatttcagtaattttccagggagtttcccgtgtgatgtgcttgccacacacagggcaacattgcatttgctgattccacaggcgatagatatattgcttgccgtctaagtgtgcaagcattcttcgggtcttgtattgatcgaagaaatctttccaatcggcatcatatgggttggcctcactgcggattttgatatgtcgctttattttcgtatccgacaatctcacaagagtgtggtatttatccactttcctgttttcaagcggtacggcaaaagtccagcttctacctcttacagtgtgataatacttgttggcaatccatcgtttaccttttttgggatgtcttctgcgagaccatcgccatagtttgttgaaaatttgtgcatctgttttacggaaagtttccgatgcagaacaccccttgtagtagttcgcccatcctctaatgactgggtttagcaatcgtatcaaagattgttgcttagaagacttgttcttgtccactatttcacgaaccttatctaaaaatctctttcgactcttcttggatggttttgtgataaacttgcctttatattttctgatattgaacccaagaaaatcaaacccttcttctatatgagttatcttagtcttttcttctgataaggtaagccctcttgcttgaagaaactcaatgactaatggtttaacatggttctccaacaactccttactctctcctgtgataataaaatcatccgcgtagcgaacaagatttatcataggagtatagtaatttttcttcgagcggtttatcggaaagctatcggcaagcagtttttccagtccgtccaaagtcatatttgcaagagttggggagatgatgccgccttgaggagttccctcctctgtcggaaaaagttgcttgttgaaaataaatccacttttcaaccatttacggagcaaaactttatccatagggatattgtcaagcaaccattcatgactgatatggtcgaaacaacctttgatatcaccttctaagatccattgtggggatgtcgtccttgccaggtcattgaagcattgttgaacggcatctgccgtgctcctttcttttctgaaaccataagaattggcatcagccgttgtttcagctacgggagccagtgccatcagatacaatgcctgcatagcccggtctttcatagttggtatacccaatggtcttaatttcccgttactctttctgatatgtactcgtctcagaggttggggtgtataacctctccttttcagttcggttattgcacacactttagcatctggcgttttccatgttaccatatcgacgccagccgttttactcccattattggaagttacacgtcttaccgctaatgctttagcgtaaaacgagtgggtcagtgtccactgcaaggctttgaccttgttgtggcgaccctctttttgagcctttacaatacgcgcttgtagcttttgaaccgcagcttcgcatttgagccaatttatactgtcccatttgctctgcgtttggtcagtcgatgcacacgattttttaatttcgttcatttgcttttctccttttaaaagttctaaaagtttcttgtaaagaatcacctaccgcagaagtcagcctgctttcgcagcgggatgatgtttcaatccctattcaccccattacagggtggcattcgctttttctgcaatcctatacccgcactccattcggcattccttacggtctgcttacctgtcattggcaggagaaatacgggcttactacgttccgtgcaagtaacttataagtgggttaggttctgtctattacaccggcagtactctgttcgtgtattcccagaatggagaggaataaccgactgcttcccttttgggctgaagcctatcagtatctttggcttcttcaaccttacgacgtttagacgacagttcgcttacgctaaccataccacccaagccaagctccctgactgtatgatactaacagccattgtctttccctcacggttctgactgctcctttcggaagggctaccttgtctggacagctttgatacagtatattactattggtgcatctgtccataggctaccgttgacgaaacaacgggttaaatctaagtttaacaattacttacacagcgacgtatcgcacccactcgcggttgatgctgttgctccggctgtatcgggagagcgactgcatattccttgcggacttctcgaacttctgtaagttttcctcgctgttgtcgataatcacatactggttgtagatgtggttgcaggagagcagcagccccacgggggaggcgaaggagaggcggcagtccgagcggtcggtggagagtttctcgtagcggatgtcggtagccacctttccgggcaaatcctccgcatcggagagggtgtgcaggcacaggcggttgtcgccgatgcgcatttcctttgccgaaaggtcgatgtcctgcaaggtcgtgtcgccttcgggcatgagcgagaagtaacgctctatcagcccggtagatttctccgtgcctacaatctcatcggtggagaggcggcgcagcctgacaaagccgctgtcgttcatgatacgctcgaactgttcggcggcttccatgaacttcccggcggtttccctgtccagctctttcgggatgatatgcccacggcacagcgtactgaagttgctctgcatccggttacgctccttcgtcgtcttggtcaggtagagatagcaggagtgtttcaggtacggacgctcgttgaagtgtcgttcaaaggagcggctcaagaaactcatgtcgtctttctgtaactccggcttatagcgttccttgatgaaccagtcctgcttatgcacgacgcagaagtccggcagcaccttgatagccttgcaccagcagccatgtatcgcctcgtactccgcgccagtcacggtataaagctccggcagttccacctcaaaagccaccgtgatatcggcgtctttggaaatgatgcagccatgctccacagcaagcagcgggaacttgttttccagtgtcgtcattttggatgtatttctcatgtcatttcttcctttcgttgccgtttgaataatcgggtgatccgccgccggttgataaggtatcggggatggctccttgccgctcccaacttcatcagcccgtgttcgccgtaccgggcgttcagcgcgaaggtctgccatacgaggacggaagacgatgccgcgccgaagccgatacatatccactggtcgatgccgaccatgtagaggatgacgaacaggacgaaaagagccagcagacctccgcagaagatgaagaggtactgagccttcaaacccttgaactcgaccggacgaccgatacccttgtttatcgggtattcagccatacattgtgtattaaaggaagaatgagcgcaggatagtggcagcgacaatcaagaagatacaagctccgaaccacgaagcagcggtcttcgaggtgtccgggtcgccggacgaaaacttgccatagacttttacgcctccgataagaccgaccaccgcaccgatggcatagataagtttcgtaccggggtcgaaatacgaactcaccatagaggtggcttcgttgatgcctgccaaaccgtttccttgcgcaaatgcggaggcggttgcggcaatcataagtgccgcagagatgatgaacttttgtctgatgttcttattcataaactgttcttgttttgtgccgtccaaagggtggatagtcctttttcgggcggttgatacttgattactttactttggttttagtggttgcccgtttgtttctacggacttgggtgtgtccgttgcggattggctgtaccttgtaccgccgtgcgcatggtgtgatgccgtcttacgttttcatttccattctttttttagtcgttatacatagtcccggatattgaactcgtcaatgttgtcgggtacggtaaattcctttttcggtttcttcagccggacttcgataagccccttgatacggatgctcagttccgtcgagccggacatcagtttctcgtacagttccgttccttccatatcggagaaaacctttgccgcacgttcccgttctgccgttgtcgcttccgggttcttggcagccctgaccgcatcgtctatctcgtcaaaactgctccccgtagctcttggtgtgtcgggcgttccgtcctccggttcatcctccccgaactccagttccgaaggcgggatgctcgtgaaggtttcatcgagtttttcctccggaacttgtgccgggcgggacacggtttccgtgtttccgtcgtcaaaagtagcctcttcctccgacagctcaatgcctttttccgaagtggcggcttcttgcgtcggtatggcagcggttgtccgggttaatgccatcttgaaacggcttttgccgatgatgtccgatgtttctgcgggaggtgtttcccgtgccgtttcctgcttcacctccgtgccgcccaatgaccgccatagcccggcaatgcctttaaggaagcggacgaatctcgtttccatgatgcggtcgtagaacagcaggaacaggaaccacaggttacagctgatcgatacggtcaggagaatcatcgtcatgctcatagttctactctggggagtgcgttcaacatacggttcagttcgtcgcggtgggtacggaagaactcgcttaacacgttttcggtgaagtcggcgattgtgacttcaccgtcacccagccagcggacaatcatggcaaccttgtcatgggtctctttgctgatggacacttgttttccttcccttgccttgaagcctgattttttcaggaaggcgtgataatcattcttttttctactcatttctttttctttttgatgattaaaatactgcgtcataattccgggcgtaaaggctctttatcgcctcttcgcactggttgaagtggtgtgtaagcacatggtcgatgtaggcggacagcgatagcctgtcatgcccgatcacacgggttatgcgcatgatgcggtcgtgatactccgggcgcacgtatgccatcttcccctcgcgtgcctttacttcgggttcacggatgaaaagccgttcatagtccttttcgccgcatttgccgcttaccggcacgggcgacaggatttccacactcgcctgcacttgggcaagcatacctccgccgtcatggtgcggacttctgcttttctggttcttttcctgattcatatccatattcaaattaagtcttcacgttgtttcttgtacagttcgtttattttctccttgtgctgttccagatgctggcgcaacacggtgtccacgtagccgcctaccgagatttcccgtccggcgatgtcattcacgattttaagaatcttgctgtgtacgtcgcggctgatatagacgcactggcgtgtctttatctcgttgcggcgaaggaacagaccggaataatcgtcctcctgccgtttgcggcggccggtgtctttctgcaccttctcccttgacggggatgccgtgggcggcggttccgtttccgggacactctcttcttcgggggcaggcacgggcggctcctgtgcgcggtacagggtcccgtcctgcttgcgtctgccgatggaggctatcaacagttcctcgtcgatgccttcggtgttcactttcctgctgcccatgctcattgaggtttgatgatacggctgatttcttccgagaactcacggatgccgctccctttcagaagggatgcgtccatcgggaagatggtagagcggaaaacgctcttgcgctcttccgagaggtcgcgccggaacttcttgctgtcgggcaggcgggtggacaacaccgacaaccccatttcggcaatcacatcttcatacaggtcgtacagcccgttcttctccctgccgtccaccatcgtccagaacaggtacagcccttttgttttcgcctgtcccgtcgtcatgaggttgtcacggaacatcacggcgaattgcagggtgctttccacgacgaagcggtcggcactcatgggcgcgaagatgtagtccatctgcgagagggtctttacaaccccgttgcttttcagcgttcccggcatatcgaagaacacgatgtccggtttcacttcttcttcggcaagcatcctttcggcatcgtcaagggcgttaagggcgtcgcttgcaatgaccggataggcgttcttttttattttgcggaagtggtcacacgcgagtgccttgaaatagaggctctcgtcgataagtttcgtttcacgttcgcgcagtccgtgaatgctgtgctgcggagcatcgcagtctatgacggcgacattgtgaccttgcacgttgtggaggtagctggcggcaagtgccgtgacggtagatttgccgatgcctcccttttgtgttgcgaatgcaacgaagatttcattactcatggttctattggttttaatggttgatgaattgtttttttgttcctgtacggaagcggtgacatacatatcggcatccgtgagacactgacagatgggaccgtcacgtatccgcttcaatggcgaagccgggattcggataaccgatgaatgacggcattgcgtcatgaagtcattgaatccgtgaatcaccacgtcactggaaaaccgggtatccgacggttcggatatttggtttggcaaatatccgccgaagcggtttgccgggtatttgaaagttcctttttccatatcttcaaatcgttcgtttcttgaatcatgctgcaaataaacaaggatatttttgaatccgtatcacttctccggcaagtggcagcacgttgcgccggttggcactgattgtccgggtcaagcctctgtccgataccgcgttaagggtgtaactttgcacccgaacggcagggttcgccgcaggtggcgcagcccggagtttgaaaggcattcccccaatccgtccccgacggatttttatgttcacctgaacatagcaagatgtcttttcagccgctcaaaatattttgagcagccacgaaaagcacttgcccttgcagggggcgggattccctccgaagtcggaaatcctttcaaacctacggtgtctgtgccttgaagcggcggcttatgccgtcaatccgctaaatccaaagtaatatgagtgaaaaaagaaagaacaaaaccgggagaaatcccaaacttgatccggcggtgttccgttacaccgtccgtttcaacgaggaggaacacaaccgtttcctctccatgttcgagaagtcgggcgtttacgccaagtcggttttcctgaaggcgcacttcttcggacagccgttcaaagtgctgaaagtggataagacgctggtggattattacaccaaactgtccgattttcacgcgcagttccgcgcgataggcacgaactacaaccaagtcgtgaaggaattaaggctgcatttttccgagaaaaaggcaatggcattgctctacaagctggagcaacataccgtagaaatcgtgaaactgagccgcaagattgtggaattgtcgagagaaatggaggcgaaatggtcgcaaaaatcagtgtaggaaactcgttgtacggcgcgattgcctacaacggggagaaaatcaacgaggcgcgagggcggttgctcaccaccaaccgcatctacaatgacggttcgggaaaggtggacatcaacaaggcgatggaaggctttatcaccttcatgccaccgcagatgaaagtggagaaaccggtggtgcatatctcgctcaatccgcatccggaggatgtgctgacagatacggaattgcagaatatagcccgcgagtatctggaaaagctcggtttcgggaaccagccttaccttgttttcaagcatgaggacatcgaccgacaccacctgcacatcgtgacggtcaacgtggacgagaacggaaaacggctcaaccgggatttcctctatcgtcgcagtgaccgcatccgcagggaattggaacagaagtacggcttgcatccggcggaacataagaatgtacgactggagaatccgctccgcaaagtggatacctttgttggcgacgtgaagaagcaggtgggaaatatcgtcaaggctatcagcgggcagtaccgcttccagacgatgggcgaataccgcgcacttctttccttatataatatgacggtggaggaaacgcatggcaatgtgcgcggacgtgaatatcacgggctggtctattccgccacggacgacaagggcaacaaggtcggtaatccgttcaagtcctcgctgttcgggaagtctgtgggctatgaagccgtacagaagaagtttgcccgttccaagcaggagattaagggcaggaaactcgccgacaggacgaaacgcaccgttctttccgtgctggaaggcacgtatgacaaggagaagtttgtagccacgctcaaagaaaagggcatcgacaccgtactgcgctacacggaggaagggcgcatctatggagccacattcatcgaccaccgcacaggctgcgtgctgaacggctcacgcatgggcaaggaactttccgccaatgccttgcaggaacacttcacgctgccttatgccggacagccgccgattcctctttccgttacggtggagggacaaaaggacaaacaaggatattccggtggggaatacgagagccattcgggtggcatgaacctgtttgcccccgaaggtccggcagtggatgccgaagaggaagccttcatccgggcgatgcagcgcaagaagaaaaagaagaagcgcaagggcttgggaatgtaatcaagagtatcaacagtcaaaaaaatcaatgtatgtcacaacaagaagacgatttgagggcattggcaaaaatcatggattttctgcgtgccgtgagtattattttagtggtcatgaacgtgtactggttctgctatgaagccatccggctttggggagtggacatcggtgtggtggacagaatcctgatgaacttcaaccgcacggcggggctgttccgttccatcctgtacacaaaactgtttgccgtcctcctgcttgccctgtcctgtctggggacaaagggcgtgaagggcgagaaaatcacttggggacgaatttggacggctcttgccgttggcttcgtgctgttcttcctcaactggtggatattggctttgccgctcccgatagaggcggtgacgggactgtatatcctgaccgttggtgcaggttatgtctgcctgctgatgggcggtctgtggatgagccgcctgttgaagcataacctcatggacgatgtgttcaataacgaaaacgagagtttcatgcaggaaacaaggcttatcgaaagcgagtattcggtcaatcttccgacacggttttactacaaaaagcgttggaacaacggctggatcaatgtcgtgaatccctttagggcttccatcgtgctgggtacgccgggcagtggaaaatcatacgcggtggtaaataatttcatcaagcagcagattgaaaagggcttctcgatgtatgtgtacgacttcaaattcagtgacttgtccacgatagcctacaaccacctgctgaaccacccggagggctacaaggtgaagccgaagttctatgtgataaacttcgacgacccgcgacgctcgcaccgttgcaatcccatccacccggacttcatggaggatattacggatgcttacgagagtgcgtacacgattatgcttaacctcaataagtcgtgggtgtgacctgaaaagtcacgtaattgattgttaaacagcaatgtatattgcaagatttaacccgctgttccgtcagcggtagcctactataaggtgcatctccagtgatgggttgtgccaagcttataggacaaagtacactttccgaaaggacaagactgaaccgtgagggaacgttaagggcggttagtatcataccgtcgagtggcgaggctggatagcatggttaacgtaagtgaactgactttagccgtcgtaaggtttgaaggagcgcaagatactttagctctcaccaaaaggtaagcagtcggataaccctcgcccatgttggggttacacggacacagcactgccggcggacttggcagaacctaaactatccgtttgtcaattgcgtggaacagggcaagcctgtatctctctcgtaataatgcgagtaagcgaaccgcaaggcaagccgaatggggtgcaggtatgagataacggagaaagcgaatgccgccctgtaatggggaggatacggattgaaccaacatcacgagttaatgagggtaacatcatccgacacgaaagtgggcagacttccgtatatggtaactctttacaagataacttttagaactttcaaaaggaggaaagcaaatgaacgagattaaaacatcgtgtgcgcctgctgacagcaggaatctgacttgggacggtatgaactggtccaagtgtgaaacctatgtccgaaagctacaagcgcgtattgtaaaggctcagaaagaaggcagacataacaaggtgaaaaccttgcagtggatgcttactcactctttttacgccaaggcattggcagtaaagagggttacttccaacaaagggaagaatacgtctggagtagataaacagctttgggactctcccaagcgcaagtacaaagcaatcggtgaacttagacgtcgtggctaccatccacagccgctccgtagggttcacatcaagaaaaagaacggtaaactccgaccgttgggaataccgaccatgaaagacagggcgatgcaagcattatatctcatggcattggaaccgatagccgaaacgacaggcgaccgtttttcttacggcttccgaaagaagcgcaggacaatggacgcaattcgtcagattgatacggttctaaatcgccagcattcccccgaatggattttggagggagatattaagggttgcttcgaccacatcagtcacgactggcttattgaaaatatccctatggataaaacaatactcagaaaatggctgaaatgtggagctgtattcaatggtaaactgttcccgacagaagagggtacaccacaaggaggtatcatatcaccgacacttgcaaatatggcacttgacggacttcaaccactcttggctgaaagattcaaaagacgtttcatcaactataagacattccactacaaagtgaatcttatcagatatgcggatgactttataatcacaggtcgagataaggaattattggaaaacgaggtcaaaccaatggtgatagaatttctcaaagaaaggggtcttaccttatccgaagagaaaactaccattacgaacatatacgatggatttgatttcttaggtttcaatgtaaggaagttcggcaaaaggctgtacacatccccgtccaaagatgcacagaaacgctttagggcaaaaatcagtgacatcgttaaaggtcataaaatgtgtaagcaggaatcgctgatacgaatgctcaatcctgtgataacaggttggggaaactattaccgatatggtgcatcaaccaatgcttttcacggttgcgacaatcacatttacaacctcacaaagaaatgggctttacgtcgccacccaaagaaacgcaagtcttgggttgcagataagtattggcatgaaattcgggggcgtaaatggacgtttgcatggaaatatgaaacaaaaagcaagaaagtgaactacctgacccttaaaaggttgtcggatatacattatactccgtacaagcaagtcaagggggaggcaaaccctttcgacccggaatatgatgattatttctttcagcgaaaggagcaacaaatgctggaatctctcaaaggacgtaagtcactcttatatttatggaacaagcagaagcggacttgtccgttatgcggcaaggagatagattgtacaaaagcatggaacgtcaatgaaatatctgttggtggttcaattgtacggcaacttgtccataacaactgctacaagcgaaataaacgaaactgttgaaagtatgagccgatttctaacaacaaatagaaatattgagttgcttgagccgtatgaggggaaactctcacgtacggttcttaggggagaagggggcagtaatgcccttgacttacccgatgtgcaaaagcagggcgacttctttgtggaatcgcccatcatcctcttcgcggctatcatctggtatctcaaaattttccggaacggcaagtattgcacgttcccccatgccattgagtttttgaaccgtcgctacgaggatatttttccgattctgacctcttacccggagttggaaaactatctttctccattcatggatgcgtggctcggtggggctgcggagcagttgatggggcagattgcatcggcgaaaattccgctctcgcgcatgatttccccacaactctattgggtcatgtcggacagcgagtttacgctggacatcaacaatcccgaagagccgaaaatcctatgcgtgggtaacaatcccgaccgtcagaatatttacggtgcggctctcggtctgtataactcccgtatcgtaaagctcataaacaagaaaggtatgctgaagtcgtcggtcattatagatgaactaccgaccatatatttcaaggggctggataaccttatcgccaccgcacgaagcaacaaggttgccgtatgtctgggatttcaggatttcagccagttagtgcgcgactatggcgataaggaagccaaagtcgtgatgaacaccgtcggtaatattttctctgggcaggtcgtaggcgaaaccgccaagacactatccgaacgcttcggaaaggtgttgcagaagcggcagtccatttccatcaaccggcaggacgtttccacctccatcaacacgcagatggacgcgcttatcccgcccagcaagatttccggcttgacgcaggggatgtttgtcggttcggtgtcggacaacttcaacgagcgcattgaacagaagatttttcactgcgagattgtcgtggacgccgagaaggtgaagcgcgaggagaaagcctacaagaagatacccgtcattaccgacttcactgacggggacggcaacgactgcatgaaggaaacggtgcaggcgaattacaggcgcatcaaggaggaggtgaaacagattgttcaggaagagttggaacgcatcgctaatgacgaaaatctgaaacatctgttgcagcagaaatagccggcaggcggcagtcggtaacggaaacgggcggggcaagtttgataccttgttctgcctcgttataagcacattattaccaagtagttaaatataaagcaaaaacagatgatggcaaacaatatcgcatcatctgtttttgcttagaacaatttatttctccaacaatcgatatcgtctgatggaacggctatccataacaattttttaggtcgtgtacatgcaacatacacaatgcggagttcttcattattgttaacagaatactttgcaggattattcaaaatcgttgcatagttcgtgtggacagcttttttagacagaaatactaaaatagcctctaatgtcatgccttttaccgaatgaattgttttcaggtaaggtcgttcttgccgaaattgatgatttactgttctaaaaagggattcaatacggacattcgcctttcccaaatcaacagttagatttatgcccatttgttgaagtttcgtaatccaattagacagtgtatcattcgttgaaggtaatttttgaataaaattaaacatctctgctctatgtcttctaaaccctacttccgctatttctcttcgcatagtacttgcgggaacataccgaacttgctttgttattttatagcagcctttttctataagagatagtccgtcagtatatttcccatgatcaatcaaatattttccatatacaatatctctaacgccgtaatgcccgtttatccacggactattctgtcttgatgaactatcattgtttactaatccaaagtttgtctcgccaaacttttgtcctcgaaatacaactgcatattcagattcatccaatcccatctcattgcatttttcgatgaaatgattcgtaatttgattgactgattccggagtgtcgagatgacctttaatacatggctcgtctgtgtaatctttgtcgcttgctattgaacacatttcatttccagagaaatgattagctaattgacatattttttcggagctacgtctattttccgacagatctaatgaatgccaatctggactattgtatttctccataaataaatgtggattggcagtattccattcaaaaatagcttggtcaggatccccaatcaacataatagattctgctccgcactgagataatttatcaattatagccatttgcaactctgttgtgtcttgagcttcatcaattattaaaatcgggaatcgacgaacaatattttgtgctattgaaggatatttatctaatattctgaatgtaaaatatattgcatctgcctgattgaccttgcctacattgaaatgtttccatttcatttctttcaattcagatataatctttttgggtgaaccatctttcttattgggattatcccaatctgcttttccgaaatgatatgcctgatatggggccaatcgcaataattgatcattaagcccaaacgatatgagatcgaaatagtagttggcatcacgagatgtaattattcgttcaccgagcttacctctaatatatcttgtttgggtcggatcataatcgaaccatttgttaaacgtggttcctactatttcaggacgataattgcatcccatgactaaatgagcataaggcaaaaatatgtacgtatttataaaactatcaatcgtccctataaatgaaggataatctatatttcgacaaccgaatgtctctttaagttctttttgtataacctcacatgcggtgttggtaaaagatatggctgcaattccttgatgtctcgatagattattctcttgtaaaagttttgccatacgcgcagccacagagaaagtctttccacttcccggacaagctttcacgacaattctcggctcgttacaatctacaacagcttgttgttgtgctgataattgaatatccatacttttattctgagggtgctacgaacaaaatagcatcctttatataatcaggtacatcgaacgttacttcagtttctaatctatcacagagttgtaatgcaaattctgctttatccttattagattttagttttttcattaaagtagaggcattaaaatcacctcttaaatcatttgtttgagcgtgcatttttcgatatacatctcgcattatacctttgttgtgttccgattgctcaaacaagtcatattcaagggtatgtggagccaaacatactttcaggttttgtccctctaaatctttagctttttgcgctctgtcggatttgtctttatcttcttcggggtcgctgtctgtaataattgcacattttgacaaaagtcgcttgctctcatcatcattgttgaataataacccaaaatgattgaatgcgacccctccaatattaactaattcgattccacttttacacaagtctattttctcagagagaaattttttagcaagaattggtataataatcgcttctgcgacaccttctaccaataatacaccgttagcaaaaaataactgtgcttttgttgtatctaaaaactttcgcaaatgccgtttgctctcagccggataatcactttccgttaatttaccaaatgaaaatgattgtacgatgttttgttttcgttgtaaaaccgaaatattattaacatccgatttcgctgtaatcgtcggagagtgcgatgttacaaatacttgaagtcctttgctttgtagttcattcagatattcaaaaaacgtattctgatattgtggatgcaaatgtgcttcgggttcttccaccagcaatgcattatagatttccagcgcattatcttcgcatctattgataaggtcacctaacaccacagacgtaaaaataagattattttcgcccaatccattttgatacaattcaaaatatttttgttcttgaccatcctcgatcgttttgtacaccggacattttaattcgacacctcgtaccacatcggaaaatttccgcccaacataacgcatttctatattaggatgtttgcgagttattcccgtcccttcaagatgggcattgaccttactttttcctgttgttagaatatgtttccaatccgaagcgtcatcttcaaaaacatggtacaagtttttagcgagcaaatcttttctttcttcatttaactcaatctcttcctcacctttattgtattttgtaagttgattaaataattgagatgtcttattgtcgtaagaataaggacgcagacagcttacagcatctcttagtggacttaaatatgtataaaagatttcttgcaaagattcgtaaggaacctgctgtccttcattatctccaccccatatcatccgtttgaaatattttttcttcccattattttcttggatgaatttcaaatgtaattgtattgtttgcttggctggatcttctttatcttgcgatatgaaatcatagaaacattctctttcaatcagagcatctccaaattcaaatgtcaagtcaaattgtattgtcgtattgttttctgttggaactgtggaattgacgtgcaaatcgctttcttgaatatagatataattgtctggttttccacatccgagacatatgcgcagagcatctataattgcagtcttacctgaattattttccccaatcagaatatttattccattcttgaaatagagagtaatatcatcaaatactctaaactgtctgatatgcaaactactcaaatacatgtttctatatttttttgtttttatacaaactccaaataattttccctgtttacaacatggaactcggcatggggatatgcttcttgaaacactttcggagcattgggcatcttgtttccccatttgaactccaaagccgtcaaactgtctgcacactcttcgatcaagtctatttcttgcttatcgtaagtgcgccagaaatagaactccttatgcagtccttcgttgaaattcgccttacgacgctctccgatgatgtagttctcccacaatgcaccgacgtcctgtcgaatggccaatggtaaaaaagcacctataatcgcatttcgaatgccattatcgtagaaataccactttccggcttttgtcacctccttgcgaaggttacgcgagtaagccccaagacgatatataacgaatactttttccaagaggtcaagatatttttcaaccgtcgttttgctcatgccgagctgtttacctaactcatcgtaagaaacttcgctgcccaactgaaaagctatcaatcgtagcaaatcgcgcatcttactcgaattttttaggccgtcaattgctaagatatctttaagcagatatgcaccaacaatatcgcgtaggtagtctgtttttcgttcatagttctccatcattactacttcaggatatgaaccgtaaattaaacgggcttcgagattctgacgagtttcaaatggggtttctatttgcgctatttcccgttgcgaaaaaggggtaagtagaaattgcgtactgcgaccaaccaacggttcaccagtcttattcagtaaatcgaatgacgaagagccgcttgccaagacacttattcccggtatttcatcaactatcaacttcagaatactaccgatttgtggtatgttctgtgcctcatcaatagccagcaaatctataccatccaataaatgccgataattggcaattgagcgattctccaacagtgctaatgtatcgtagtcttcgccgttgagcatcatcgtcctacctgaatagttgtccacaattttacgcatcattaccgttttaccaacacggcgagcaccaaaaatcaatactgctttattgggcgcgattcgtgctgtaatcttctcttgaagtattctatttactgtttccataccttgataaattatactgcaaagataatcatatttctttaattggcgaattttacacaaaaaacagactataaaatggcgatttttatgttttcaatcttaaagcacttctttcaccgttcgtagtaattataaatgttaataacactaatggctctattatttaccctacataatctttctcaatttatcattattgggttgaaaggtctcatgtcaaactaattcgcatgcaatcaaatgcaaactaaaaagacaggaatactccatcctgtcttttcataataatgtatatttgttatcttctcatgcgctccatctcctcgtcacgcagcatcctctcgttcaatttctcctgcatcctatcaaggaagtaggtgcggctctcgttcttccggcgtttgatgtcgatgtagaaacggtagcagtcctttgattcgaccccgaaaatcttgtagagaagcggggcaagctgtttgagcggtatgttgccgttgttgatgcagcccatctcgttgatgccgtagataagttccacgaggtcgatggcgttgcctgtccattgcaggggtgaggcgggatttccggttgtgttgtcggaggatgtacggatggggattagtggtggcacgtggggagcggcaaggaacttctgcatcttcctaacgaaagagagagccttgctgatgtaggctgcaacctccctcttttcttcgggaagattgcgcacgggatggtgctgcaactcgatttcgatgtaagccagcgcgatgatagtgcggttggtgtccatattgtcgctgcatagctcgatcacttgcgtggcgaaagccgtgtatgccgtttccatattgcagtccccggcttcgtttatacggcggaagaactcggtttccgccaataagaaataattcatgtcctgtcaattttgaaattttacactctgtttttcggttatgcgcacatgaatatgattggcaaaaagcatgtccataaaacaaaaaatccggcacgttctctgcaaggtgctggatttcagtgtgataaaatgtgatattttttgtcggatgtgaattataactttcttaaaatgtttgttatcagtacattgttttgattaaggaagtctaaaaatgtatgaaagcggaacattccggttatctcgtggcttccatccgcgtgtagatgctgcggcatacaccgttgggatagcttttctgcgaggttaatatccattgtgcttcgggtaggacggactggaagaagtgccgccccgttcctgcgatgaatggtacggtatagaggatgatttcatccaccacacgcatccgcaacagcccgttgatatagtcagccttttcaggagtgacctctgccagatagcagattcttgtattatccttacgccattcgtcgagcatagaaatggaatagtcgggtgtgatatgataaagggcatgcttccttatttcgttgatgccacatttgtcaaggtgcagttctttatacgccttgcaatataattcggaaatatgacacccgtccatagataggacggcaagaatctgaactttacccatactatttttcttttattaagcaagggtaaaaaagtagcgtgcaatccacgctatcactaatggaggccctggaatgcccttgacagaaataggtgaatgcacgctatgcgtaggcatagcataagcaatcacgcaatagtttctgccaatgtccattttccagatttccattagaaacaccttgcggtcttatgttatatattagcggcgaaaggctttgccaatcgccgtttattctctaaaatcatacaaagatagctattttcagcgaattgccggctatggttgctgaaatttatatttcaatccatattcttccagtttgctgtacagtgttgtacgtcctattccgagcaattcagcggcaaccttgcggttcccgtttgcctgctttaacgcacgtaaaatccgttccttatcctctgtgtcattgcgcagtgcgaagctgacaggtgagttaggttttgttacggcaagttccagatgctctttcgtgacaagacccgtctgtgcctgcaacaccgcgcccatgattttctgacgaagctcgcggacattgcccggccacgcatgggtcagcaatgtcttgcgggcttccccgtcaaagccgatgacatcgcattccagttcccggttcgcaatttcacggaagaactcagccagcggcatgacgtcctcctgacaatcgcgcaacggcgggacggttatctcgaagtcatgcagacggtacaacaagtcctgccggaaacgcttttcatggaccgccttctccagatcctcgttggtggcggcgatgatgcggacattgaaactccggtcagacttgtcgccaacgggacggaaccgccgttcctgtatggctcgcagaagcatctgctgggtttccggtgcgaggttgcccacctcgtctaagaacagcgtaccgccttccgcctcgtggaaataacctttcttggcactgtccgcaccggtgaacgcccctttgacgtgtccgaagaacgccgacggcgcaagctctttggtaagcgaaccgcaatccaccgccacgaaaggcttgcctgaacgtttgcttttgtcatgcagatggtgggcgatatgctccttgcccgtgccgttctctccgaagatcagcacactcatatcggtgggggctaccagccttatccggtgcatgattttctggaaggcggaaccgtcacgggcaaagacgggcatacggctccgtccaacactgtgttctttcaatatggtgcggagtaatgggacaagtttgtcctcaaccaactgtttgggtatataatccaacgagccgagtttcatactttccacagccgtatgcacttcggcatagtcggtcatgatgatgaacggctgcgtcatgccttccttgcgcatccaacgcaacaggtcgataccgttgccgtcgggcagacgcaaatcagaaactactatatcattgtcagcggcttgttgcagaagtttcttcgctgtcgagaggtggaaagcctgcacggtacggaacccttcccgtgccagcaggttgcagacaaactcgcaatacacgatgttgtcctccaccacgataatttttgttttatccattattatatttcttcctttcttcttttgccagccggataatcttcaaacctttatcctgcacgactgtcaatatgttatgtatcgcctcccaatcgggtgtatccttacaatgaagcagtttataaagttcccttaacggctggtctgcacgtaatatctcccacgagctgcgcaagtggtgtataagggcatccagcccttgaaggtctttccgccgttccgcatctttgaccgcctgtatttccttttcagtttccgttatcaacttctccagcatgacggattcattgccgtaggatagcagggatgtgaaatccggtttttcattttgcaccacattcatggcgcatttatctgaaacctccatcagctccgatatggagaacggtttgagcaggcaatcggcaaatccacgttccataagttcctccttgctgcaactacccgaagcggttgttacgataattggaatggtccttgaattgcccacattggaggtgcgtagcagttccaacagctcgaagccgtttatatccggcatattcaaatcggtcagaagcagactgtattctttccggcgtatcatttccatcagttctgccgcattggtacaggtatcgcagtgtatcccttcctgtacatacatttctttcagcataaggagcagtacctcgtcattgtcaatggcaatcacattatggaatacatggttacaatgaatctgtgtttgatttatctgttccggtagttcctcgactgtctgcataggaatttccactgtgaagcggcttcctttacctttatcgctctccagccggattatgccgccgagcattgtcacaatgcgctgaacaatggaaagacctaatccgaagccgtcctttgcggcagcgtttgacaaacgttcaaacgcaccgaacacacgttgctgttcatcttcggtcatgcctgtacccgtatcttcaacagtaattatcagaactccatcggtatagtcggtagtcagcgacacaccgccttcctccgtgaatttgatggcgtttgacagcagattatttccgatttgcaggatacgttctttatctgtttggacgagggcatccttgtggcaatgtattgtcagagccaatcccttgttcatggcgattggcataaactccgtttcgagcgtgtgaatgattgcggaaatcctgcacggagaaatgttcggctgttccttaccgttatccagacggaaaaaactcaataggatgttgagcatttcacgcatacggtcggaggactgctgaatattttggatataacccccgattttatccgtattataatctttccgcatcagtccggcataaccggttattgccgtcagcggtgtacgtaattcatgggtaatggtatgcacggctttcttgcgggaagctatcagtgcctcgttctgttcaacagactgtctcaactgttctattaaatccgcagtttctcgcttgtatcgtttgatacgggtgatatttcggtggataattatgtaagagattatcaataacaaaacaacgaatcctgtcaagccacctatctgaataaacgatttttcacgcatggtggctatctcgtcctctctcttttgcaggtcagcttgtatttttccatctatttggcgaatcaagctttttaactgacggttaagttcggcatttcgtgcagcaagactgtcagcgtgttccgataaacggcggctttgcgcttgttgttcggctatcatattccggttaagagaatggagcatcgtggtagtcacggtgggctttgcttcctcctttttaccaaagatacccaagaagccctttcgcttcggcttcttgggttgttcttgcgtacttttatatacgatttcaggcacttgacgggctatcttttctttgaagcttttctgttcatcaagcatctgtacaattcgtcgcatttgtttttctttatcctctaaaagatagcgtacactgtcaatgcgttcagacgggtagatagacgtgaaataataaagcatactatccaaagccatacgctgcaaatgataatttgcaatatctttatcttcccattccaatattgtttctcctaacagagaaaatcctgttaagcaaaagtttaattcattaacatgtcggcgcaactcatcagtggttcggttctccttctctaatatttcaagctttttccattcatactgatagcaatatataatcattcctattagtatgaatattagaatatagccacatgatattagcttgcggattgaaatcataaatttaatgaggtttgaaggagataaaatcaacaatgtcctgaaggacttcgggggagattgtttgctcgattgtaccgtattcctgtaccgctcctgtatgggcgtgttggaaaaggtgattaagtttgggataaagtttcacggtcgctttcggggcgattcgttgcatttgaggcatattcagttccggacgaacttgtatatctttttctccgtatagtacgaataccgggcaatccgtatcagcaatgctttccgccggtgaaaaacagatatagtaatttagccacggattattgtcagccgcaatctttttcagattggctttcaaagatgtgtgaacgggagtattcacccaatttgcacatatagcctcaatattttcaactgccatattgttaccctcccttattttcagttcatacatcttgtgcaatgcctcaacataatccgatacaatattcgccggcatgttgccctgttccagcattgtcgcactctggtctatcaataccgagtcacctcgaaccgcctgtgcgccaatggcaataatgaaattcggatttgagaataatcccgaattgttatcagctcccaacatgaacgccactgccgctccctcactatgccccagtattccaacattcttgaatttcatttctttacgcaggtattccattgctgttttcgcatcccgtgcaaaatcttcagtggtggcatttttgccgtcaccggttgattctccatatcctcggtcatcgtatcgtaaggttgcaatgccgtttcgggcaaggtaatctgcgatgacagcaaacggcttatgtccgtatatttcttcatcgcggttttgcagtccgctaccggtaatcattacgatagccggagttgtctcattaagaccttcaggtaaagtaagtgccccagcgagagtaacaccatctgataagttattgaaacgaacctcctttgtagtgtatggatatggtggcttaggcgtttgaggtcgttttaattccacaatgcccggaaataattcaaggtcggcactcattgctccttgtgtgcatttcccaatgagtttcccatcttgtttccgtcctgtaaacgtcaatccgatgcgtcgaactgtcacatttacagaatcagccgaaaggaaattcacttctccggctattccgtatgctccttgatccggagaatcaagcgtgactgacggtttgccatcttcttctatcttgaatttgaacacaatctttaatgccacttgcggagttatcttcaacgtaccatgccacgctcccgaaatattatcatcggaagccatgatgtttaacatggaacaagtggctaaaatagctgcaattattattcttttcatcattataaaactattgctttgttagctccattaatatatgaccatacgtatctttcagatacagaacggtgttgttttttagctcgtatgacttgacacagtgtagatttgcctctatacttctttccaattccatatcgtcacatgatactataccctctattgacttttcagtcatggatatgttggagaagcccaaaatattattatcctcgacaaaattgcctgatattatgttacagtcagtggtgcagacaaatccggtgttattcaactgtaaaacgcagtccgattcctcgtttatgtcagttagttcgtttgaagttataacgatgctgttgtatttttcaagttgccatttcccacacaaactttcatccggtaaatcatacctgattagttccatcaggatatgacctttatcatctttcagcactaagatagaatcgtctgtgatttcgtatgatttgatacaaggtagattatacacgatactcctttccactatcatgttatcgcaagccagttcggtaaaggatatatcggagaatttcaaagcgtttttgcttttttcaaaacagccggagatggtattgcaatcggtggtacaatagaatactccggttttatccatctgcaatacataattacaattctcatttacctgtgtcagcccgtatgaagaagtggcgatacagttgtatttctcaagtcgccattccctgtatagggcattatctgacggtgcattgcatgagccaaccaatatggctaatgcaagcattattgctgtaagaatgtttgttttcatatcatttgcattttattgtctgacattttcgcttgttcatttcctctgcatacgctatttctccgtgttcccgtatatagctgatacaagccggacgatcagagttgaagagcaaagcgaacactttgcttataaagttggaatagattttacactcccttacgtcacgctcgcactcggcacaggtatgatagcctttgcttatgcaacattggcggattttacaccacgatgctttctcgttgttcttgcatccggggcatttgccagacaagaatttgcgacacgctccacaatacagcccacaggcggctatattgtctttacttactgttatacttttcatattcaatgttttctatctgtatggtttttaccacagccataacatataccgtcatgaactgatatgatccttccgcaatcagaacaagtccaacgctctttctccctttgcaggaatttttcaataccattttctctgataaaggcaagattgcccataagcgattctatcatcggatagtcgttggcataccagcactccttatcaacaatctccctgcacggatattgaggacattcgtcacagaatccgtccggcagtgttttccgtatttcgcactttacaatcttacatatattggcgcaatactcacctttgtaaccctcattccggcaaccgacgcaagagctttcttttcgcagtgcttcgctgcacacagtacagttcagcccgcatggggcaatcatatttttattcataatacagttttattcaatttgttaaattgcgcccattacatttttttaggccgctgtctatatgtgagaaagacccatacagtcacaaatcaagcaattgtatccgcactaatccaaattccgttcagtcccagattgaatatttcagatacaggagatgccatactgaaagtacggcacactccaagtatcagataagatatttgtactattggtatttcttcctgtttttattcgccgtttgatgaccaatattcgttgcatatatagtagttgaactccagcgtgtagcttgattccgacggcagcccgctatttagtccggggtggaatttggggagcatacgcgccacacgcagagcttcggcatcaagtgtcttgcctgagcttttaacgattcgggcatcctttacaactccgtctttggcgatggtaagctgcactacggcatccatgttaagaacaccgtctttgtatgcagtttcagggaaggagatggttttattgataaaggctctcagtttgtccttaccgccgggaaagttgggggcggtttctgtcctggtgaatggcacggcatcggccgcgtccgctttctccgtgaccaccacatcggaatttctttctgtcactcgaatggtggaatcggatttttcgctaattttgtaacgcagattctccaccggcgtagcggcagatacctcgttgattactgctgacaccgcaggggttgccagaccgattaacgcgagtgccattgcaggcaccatgacaaaggcacgcacacgggctttgcctgtcggtttgcttgataacatcatagttatacgttttttaagtgaactgtgattgagacagttggaaagagttgcgaaccttgctccaactgtcttttttattagaaatatctgatactcctctcgttttatgcccgatgcaagcacacggctgtcggcttcatactcatgaagggtatgaagctcattgcgcagaagccatatagcgggacaataccaagtgataataatcgctgcctgcataaaaagcaagtcaatccaatggcgacattctatatgcgctttttcatggcatactatcatctgcccgaactcgtaccagtcacgtcttggcatcatgatatatccgcgccatgcaaacggggagacgctgttatggcgatgaagtataatgcggcagtcatcctgttttatatgctcacctttgagaatgaacagtgtcagccgtaccagtgaaacaaggaaataaatagtcatgacaataactcctataaggtaaagtgtgactatataatcccatatcggagtgatttgctctgataccgtattggctatataggcaacctctaccggattaaaagcgatttcaatattattctccataatatccgcgaaccaaaagggattaagtatgaagatgggggaaacaaaagcaagcgttatactggacaacaacaatatcctgttgaaccggaaacatccgatattggcaagaacgcatttgtacaccacccagactacaatcaggagggtacttgccaataatgaatatgctaaaaatatgcctgccattgttattcctttcctctgttagatatttgcaatattatttccttagcttcttcatcgctatattcctcgcttttaatcaggaagttcacaacattttgaatggaattgtcgaaataccgcctaatgacactcttcagattttgtccacaataatcctctcgctctattattgggaaatatatgaagccagtgctttcggccttgtggtcaagatagcctttctgttcgagaaatttcacgaatgtggctaccgtcgtccgacttggcttcggctcatcgtgaagggcaacaacatctcgaaccgagagcgccccgctttcccaaaagaagttcatcacttcttcttcacgttctgttaatggcttcatattttccagttgtatttggtctaataaaattagacaatttgacaatacaaaagtagtctaaataatttagacaacaaaataaaatggcagaaaaaattgattatagatacggatagtggagaaaaccgagtagttctctccactgtaacctacgttttcggctctttacttgtcgccataaagcccgatgcggttgccgacaggatcggcgatgatggcgaagtaaccccaaccgtcaacctgaatcttggtcttgggagttacgagcgtcgcgccgttatccaatgcagttctcacgctggcatccaaatcttttgtctgaagatacaccaacacgcctccgttagagggtgagaaaccggggaacgagggggccgaggagattgagcaaacactcttgccgtctttcataagacaggccattttctcgtcgccgaactgcgacacttccagcttttcgccgaagagtgcctgatagaacgccaccgacttgtcaaagtcattggtggggatttcaaaaaatgcaatcatactttttattacctaagttcaagcggataatgcaacaggagtgagaatgatgacaatgagaagatacgaaaagaataatttttcagaggaacagagaaagaagatttctttcccttttgttcccctgtggaaaagttgtttctttgcatcttccagttccccaacattcagttgcaatatgaaacagctaaccgaagaacaaaggtataacatttccgcttatctgcaaagcggaaagtcaagaaccgagattgccaatcttgtaggagttcatcgtagcactataagtcgtgaattacgtcgtaatagtgataaacgtaatggcatttacaaaccggatctcgctcaggctaagtatatgtccagaatgcgttcacgaaagcacttcgtgaagtttacggacgacttgaaaattcaagtagatatactcataaagaaagatttcagtccagaacaagtgactgggtttatgcgaacaaagggcttggaaacagtttctcatgagacaatctaccagtatatttgggaagataaaaagcatggagataagttgttatacaagcatttaagaagacggggaagaagtcataagaagagaggtgcattgactaatggacgtggttttatcaaaaaccgcgtggacatagacaagcgtcctacgatagtagacaagaaagtacgttttggtgatttggaaattgacacagtcattggaatgaatcacaaaggagcactattaactataaacgacagggtaactggactagtatggataagactacttagcgggaaagatgccagcccgctaactaaagctgccatcgatgccttggaaccttttagagaccaaatacatacaataacggcagataatggaaaagaatttagttttcacgaagaaattgcacgtaaactaaatatttttgtttactttgcaaaaccataccactcgtgggaaagaggagccaatgaaaacagcaatggtttgattaggcaatacttcccgaagggtacggactttagggacataaccaatgaacaggtaatgcgcgttcaaaacatcttaaactcaagaccgagaaaaagattgggttacatgaccccaaaggaaaaatataaattattaactaacaatgaattcgacactgttgcattgtctgtttgaattcaggttatttgattagtacgctgcaaagttacagcgtactaatagcctgtgatagtaaaaagcggacattcccttatggcagatatggactaatgctgattatcttcagcattataactgttctgtaatttgtcactgaacgattctctgatagctattctcaatccgttcaagaacgattcatggatatatattgaagaagtcggacagttgtcagcacataatctgcactggatacaatttttctcatcaatcggcaaaaccgtatctttttgtgtgaatatgtgcattggacaaaccttgatacatttcccgcagtttatacaggttgaggtatttaggaacaccaccttattaccggctactatatctgaatttttacggcgtatcggtatgccctccgaatatccggttaccggatctttatagataagagccaacggatgcaacttccatcgaagtttttctgcaaatagtcttgccttgaacctatcccgttcattcggtctggatttattgtagccgtccataagaacccacggcccggtgcggtcaaatcctcggcatgaaaattcgccggttataattccacctttctcttctatgatttttttgagtggcttatgatatgctcccaagaaaggtctgcaacgggtggagaatacgaacacatttttgcctttaagattttgacctgaaacaaatcgttgaagtcgtatatcgtgagcggcaaagtttatagcggagccaaagcctataaggtcataatccgacaggtcgattgacggattgctgtcgatacataccaattcggcagcaagggcatctgccatgctttgtgcaatttttagcgtgttgcctctgtatgaggaacgatagaatattattgctttcattttgcgactgatatttttgtttctggtgttccgggccccccgtttacgcccttataccccacaaacatcaaggtgttcgtgtcaaagtaatagtcacagctccagaaagccgacataaagccggtaatactgacttctattcttacagcattctttccgtctaatttctcatttcctttctttgctgccgacatggtatagagcttcatgttgtcggggcgaaaacactcatattccacagacctgccatttttcagagttaatcccgcattataggctatgttttgataccacggcttgcctttacttttcaccgtctttgaaatctgtttcccattgaacttgccggatatggagtacataccattatttaacctgattgatagattggtgtttgaagaagtatttactatcttccaactctcggttttataatcggttcctaatatatactcatgcttctcaccaccttgtaccgtatgtaggtatatctttccatccttgtgttcctccgtccatttgatagcggtttttgtcttgccgcaggtggaaatatagtttctttcctgcgccattgcaaaagctgtaagaaacagcgtaagtgttattgtaatgatatgtttcatagacagttgttgtcaaagataaaatccacatatttggaaatcatagcttccattctttcccatgcttccggtttgctgaaatctatgccattgattttgtgatattgccttgtgaaaagaactatgtagttgattgcggatatgattatggcgatagacatattgttatcgccgccccgatccaaaaacttattaagttcctcctgcaatttatgaccgatacgctcacgttcttcgataattcccttgaaagtcgaatgacctgaaagttcccataccagaagttcctgcatgagtacattatcttttagatagttaagctgacacataagcacatccttaacaatctgctttatgttaccgtctttaactcgtttaatggtgtcaataaactccgaataggcaaacgaataatagtcatgacgctttgcccattccacgagcaaaccatccaacccaccgaaatagcgataaatcaaaaccttatcgcatccggcttgattagctatgcgattaactccgattttggtaaaaccgtcgttctctacgatatggctcacggcttcaagaagccttttttctgtttctttcaattccatcttatataatgtcaccaagtggtgacaaaattataaaaataatcggtgacaaccaaatacaaggctgtataaacgctatttttcagaatgtaaaatagtcagaaacaggagagtattgagcaatatactctttcggtgtgtagccggagaatagcttgaattctttaatcatgtgggattggtcggtgtacccacattcgtatgacagctgcgcaaaacctattccctgattatgctgcatgacagataaggtacgttgcaacctgactatacgcatgaaatctttgggtgtcgttcctatgttttccgagaaaatccgggagaattgtttctcactcaaacacgcaatatcagcaagcgttttgatattaccctgtcttgaattgtttatgtaacggattacttctgcaagccgaggcaaatggtacgacgtttcatgaatcaaccgtttgcataaataggattcaatcaaatcaatgcaggcatcctgatcttcgcactcttcaatcttttttgcaagatcaagcagtgccatgtctccaatatcggacaatgcaacgttcctgtcacggaggatattgacaggcataccgaaaaacatctttgccgtatgaggctggaatacgacaacaatcatttcgatatttcctgtcgcgattatctctgaatatccgccttcctgaccgcaaataaaactgcggggctgtaattcttgacggttgataatccgcaatctttcgccacgatggaatacaagggatgcacaacccataggcaacgtgcgctgtgatacgctgcctgacgatgaagactgtaatatccaataatatcggataaatggcttcagaatatcagatggttgtataactctgaaagtttgcatctaacaaaattatggcgaaatatcctgccgtgatagtaaaaaacggacaaattcaatcaaccgaaaattcctctgaatgatagttgctgtaaaagcgtccggaaattgcagtgaatttaagcacacaatagtcgggatcggtgacaccttccggataatattccgtatctccgtcacgccaaatcatttccttgctttgggcatctgtcagcacttccattgttccgcgaagcattgcacctctgaaaaagcggttgtcacagaaatatacacaggctttgttgtctgcgagatattgacgcacacgcatcgaggatgtgtttgttgtgaagtagaatacttttataccttctcttttccgaggctggagcatagccttgacattcgggaatccttgctcgtcaacagaaccgatgaaggcggtttttaatttgtcagccatattgccgactgtttgttccggatttcgcatagtttatagaattatatagtaatatgtgtaaattcatggtttatccagatggtcgcctccttgccgatgaaatgcacaagcacatagttttgatctgtcgggccggctgggaagtaatttataaaatgctcctgccacattcgtttgcgggtttcattatctttaatgacttcaactgtgcctcgcaacgcgacactatcgccgtaaaacgaatatgacagtccagctttagaattgactttgaaatccttgactttctccgaatcagcagcagtgactacccagacatcattgcaacctaccgaatggattttatccaaaggcacaggacgcggaaaaccgtccgcattgaccgaagctaacgtaacttctttgcactgagaaagaagatgtgctgccttttcaatcaaacttctctcatctttctgcttccagcgttttaacgtcggaaagagttgctgcatttgagcctttgcctgttgtggtgtcagattccaaccggtttccttgttaatctggtcggtaaaccgtgtgcagaactcaatcatctgattcatgttgaagtcctgcaagaacacaccgtttttatagcagtagccacaatagtcctcgcttctgctcccgtcagaatttgtaccgatatttgcatcagtaagcggcatcccgcaactttgacaaaatttttgttccatatattgagatttatcaagtcatttttgtggttcaagattgccaaaatcaacttttagcaattcataataatggcaatctaaaaatttcccattcttgaaacaggcatcacgatgtatgccacatttgcgaaagcctgttttctccaatactctcattgatgagatattatctgcatagacatttgcataaatacgaataacatctgtattggaaaaatagttaccaatagcaaatgccaacattttagtcataatgcccttactccaataaggttcggcaagccaatatcctaattcagcattgtagcgttctacgtcaacgccacgagtaaaaccaatatttccgacagcctcacaatttacttcaatgcaataattattctgctcgttttgatttaacacaaattggatgaattgttgtgcatcgctttccgagtaaggatatggcagactatcccgacaattatcccatatctttttgttattaagatattttgccaaagtggaataatctgctttatgccaacttctaattttatatttgtccatattgtcaatctattttattactgcgttttcactcaaagaatagccatgataattctctttcttccagatccttacttctttcttctatccagtcaaaccaaaccagactattctggaaatttctgctatgatagctgacgtttctgccatatcatagccggagtcagctacaaacaccgcaatggagtatctctctccattgggcaggttaacatatccgcagtcgtttatagctgagatgcgtccatctggtgtcgggaatccagtaccggttttatgtccaatcgtggcatcacttgacaataagggagctacaagacggtcaattccggtacggcattgttcaagcatagttgcgatttcggaatacgatagtgatgtgttcctcatctcagcataaaatctgttaaagagttgcgccattgccaaaggtgttgtcctattcagataactaagatatggatccctgtgcatatcgtcttccgaggctccaatttcaatattgtctgggacaccaatttttctcattattttagttgcgccagatattccgccaacatggttcaaaagtatatcggcagcattgttatcactctccaccaaagaccattcaagcagttctcttacagtcatggtattgcgtttttttccataccttttgagcatcgggctataagtattctcttttaaggctttctcactgaacgcaatagaatcgttcagcgacaagccgttagcatctatccattggacaacagtcagagccaacgggaattttactacgctcatcataggaaaataccgcttcccgttgatggatattgtatctgtgccattgactatgacagcgataccaatccgggcatctttatcgctgacatattccaacagagctttctctatcgttttgtttccatcagcggaagctggcaatataaaagacagagatattagtataaacagtaatcttctcatttttgacggttaccttctatcacttgatttatcaattcccggacttcatcgtccgacatctgcctgtcccttacaagagtgcttatcactccacgaatggaattattgaaatatctctgtactacattcatcaaattgttaccacagtactcctctctttctataaggggataatagatgaatccgttgttcccagccggtttatgacctaaaaagcccttatcaacaagaaacttcacgaatgtagatatggcagttcgacttggacgaggttcaggataagtggcgataatctccttaacggtagcttcacccttctcccaaaacttgttcatcacttcttcttcacgcttggtaagttgttccattatcaaatgatatttagtatatgcaaaattagtctaaataaattagtcaagcaagcaaatacggctatttttatgatttataagcaaacgtgattattatgataatgaaatttgtagattaatgaatgaaaatgaagcaagaggacgatattaaatgattatctctcttgcttcattattgtttacatttttatccctttcggacggttttcatccttgatctgaaaacccggacgtccgatgatgacacggtctgcaatggagctgcttgacggactgcgtatctgcggggattccccggtgtgctgtggcggcacgttccgtacaccttccgaaaccgtcttgacctcctgcccgtcgttctccttttcggcgacttccggagtaggcggcgcaagctccagctggatcttgcggtcaagcgcggcaagttcggacttcagctgtttcagctcgtcctccttcttccacaccttgcccgctatctcctgcaactgcggaatctccttttccagcacctcgttctttgccttgtactggtcaatgatagacggtatcctctccatagcgttcagaaaattgcgtgcggcggctaccgggtcagccatcgccagatgcccgttgttgtaggtgtacttgtagtttccctccaccacgaagcggttgtcggtaaactccaatccttctttgagcatcctttcgctgaccacctttatcggaaaaccgtaaagttctccgacaggcttgtacaatccacccgtcgtggcgttcttggcgatttcctgcaaacgctttccgataaccttttcatcggtagaatccatgccatccaccttgactgtattcaggcggttgccttccttgtcggtctgcacaacagaaagaaaacggttccagtcttccgtcatggcttcgatgaccgctgtattgttacgcagttctcctgttttggattccagcttgaactccgaatcgcgtttgcccttgttgaacgacttgcgttccccttcgagcgaggcgatgcgcttctctaatttcgccttgtccaaaaggtcggtattaccggagagcaacgccatgtactccgagaagttcatgcccgatttctcgtccatagccccctcgtcgatggtacgcgcgcccatagccccgcttttgagctgcgatatgaacgtctgcttgcagtgcagcaggttgaacttgtagctgtccagcgacttctccacggcatagatgatgacatccacgttgttcccggcaaagtgtttggcaatctcgttgcctgccctaactccccgcccgtcacgctgttgcaggtcggacggacgatcgggtaggtcaagggcattactgccctcttcccccctcagaaccgtacgtgagggtttcccctcatacggctcaagcttttcaaagtctctgttcgtgtgcagagaccggctcatcctacttcttgtttccattgtttttacgggataatttgaaacattcatcatgaaccaacagattgcatttccgtccgtcttggacggttggcattacgttccatgccttatacgtgtcaatcggttcaccacatatcggacatttccgcccttgcttttcccataggtaaagcagggacttacgtcctttcagtgtcacaagcatctttgacttcattcttttattgaagtacaggcggcagtctgcgtcaaacggattcatatccccttttatctgcgtatattgcaggaaaggaaacgaagatgccagtttcagcaaagtgagttggtcttccttgccgtttgatttcttgaacttagccgcaaaagtccagctgttccctcggatattgtgccaataacggtcttttatccaccgttttcctttcttggaatggcggcgtttagcccattgccacaaggcgagaaatatctgatggtcgattctgtgaaaagaatcacgtgtcgccccatgctgataatatgctccccatcctcggattttagcattcaacattctgattaatgattcctgcttgcaacccttatgaccttttgtaaccttacggatattttccataaagcgtttttcggctttcttggtcggctttgtcaatatttcattgccgtatttgcgaatattgaaaccgaggaaatcgaaaccgtcacgaatgttggttatcaccgtcttttcttcggataaggtcaaacctctttcagacataaagtcggctaccaatggcttgatttctttttcaagtgtttcacggttctcgcaggtaattataaagtcatcagcatagcggacaagattcaccattggcgaatataacttgccttttattctaactcgtttatatttctctgcaaggactttctgcaatccgtccaatgtcatattggcaagcgtgggagagataatgccaccttgtggcgttccctcctctgtcgggaacatctgtttgttgaagatatagccgcatttcaaccattttcggagtattgctttgtccatagggatgttggcaagcaaccattcatggctgatatggtcgaagcacccctttatgtcaccctccaaaatccattcgggagaatagcctttccggagaatgttatgacattgctgtaccgcatccatacagcgacgttccttgcggaaaccgtacgaacgtgtgtcggctgttgtttccgacactggttccaatgccatgaggtaaagtgcttgcatggctctgtctttcattgtcggtattcccaacggtcgcagtttgccattactctttttgatgtggactcttctcaatggcttcggcaggtagcctctgcgtttgagctcacttatcgcttgtgtttttgcttcgggtttctcccatgtttccatgtccaccccgggggtgctaccacctccgttagaagtaactctctttacggctaaggcttttgcgtaaaaagagtgggtcagcgtccactgcaaggctttcaccttgcccgttctgccttccttctgagcctttacaatgcgagcttgaagcttcttaacagcctgctccgctttggtccagtctatcctgtcccaattcgtttgcaagttatcagtcggtgcacacgattggtcgaggagtttttctttgattttatcgttcatttgcattcctactttaaaaaagttctaaaagtctattgtaaagaatcaccatttggcaacattcggtttgttttgcctaccgagtgtcgccacagaagtctgcccactttcgtgtcggatgatgtcgcctacatcagcccgtgatgtcggttcaatccgtatccgttccattacagaacggcattcgctttttctgttatcttatacctgcacaccattcggctttcattgctgtcagcttacctgccatttttacatggcaggagatatacaggcttaccatgttccacatagataactaacggataggttaggttctgtctcatcctccggcggtgcttatatccgtgtaatcctaccatggaaaggattaaccgaccgcttcccttttgggtagagtgtaccagtatcttacactctttcgtgacattacgaagtttactaacagttcgcttgcgctaaccatactatcctgcctcgccactctacggtatgatactaaccgtacttgacttcccctcacggttctgtcttgtcttgcgaaagtgtactttgtcccaaccgcttaatacaactattaaggtgcatcggtggtaggctaccgctgacggaacagcgggttaaagctgatacccgtaagtatcattccaacaattatctatgcgacttcatgtcgcacccacggtgtatccaaatgatggattgccacacaccttttttgcgcgttcacacccgttccgagcatacttgtggagccgaacagcacgcgtaccgttccggcgttcatggcgtctatcaccgccttgcgcgccttgtcggtcttgcactcctgaatgaagcgcacctcgcttgccggtatgccgtagtcctccgtcagtttccgctttatctcgctgtacacgttccacccgtcgcccggctggtacgtgcccagatccgagaagacgaactgcgttcccttgtgcgcgtcgtatttgtggtaatactccgctatcatcttggcgcagtggctcgccttgttgtcggggtggtcctcgtaattggggtctatcatgcgcatatccaaagccatcttccgcgcgtagtcggtggcgataagcatctttgccttctcctccgtttcagacagcggcatcctgcccagcagcgtggcgtcgcccgtcttcgcaaattccatcagttgtttgatgaaatattcttggtcaggcgtaggcggtatgttgtgcagtatctcgttcttgtgcggacggtccacacccacgtcctctgccgtgcggtagtcggtaatctcgttgtagaaggcggcaagctccggcactttgatgaagtagcggaaacgctccttctgtaccacgttgttcgtcacgttgaactcgaaatcggtcgtcttcttggcgaagatagccgcccacgcatcgaaacagcggatgtcctgccgttccagttccttcggacgcaggtacttgaagagcaggtacaactccgtaagactgttagatatggtcgtgccggacaggaatgtcgcccccaagtccttgcccgtgcgctcctgtatggttcgtatggcaaagagcatattcagggctttctggctcccttccgagtttcccaagcccgccacacggtcatgccgggtattgaaagtcaagttcttgaattggtggctctcgtctatgaagatgtggtcgatgcccatctgcttgaagtccaccacgtcgtccgtgcgcgacttgatggcgtgttccaccttctccaatttcgccacaaggttgtgcttgcgcttctccagccctttcagcatcgcccgcgacacgttcttgccctgctgccgcaggacttcgaggttttcctccacggcgtcaagctccgcttgcagtatgcgctgctgcaactccggcgactgcggtatcttgccgaactggtcgtgcgacatgatgacgcaatcgtagtcgttgttcttgatgttgttgaagaaacgcacgcggttggcggtcgagaaatccttctcggaggcatagagaatcctcgcatggggatatgccgcctgataggtggcggcaatctcggcgacattggctttcaacccgataatcatcggcttgtgcgccaggttcagacgcttcatttcatgcgctgcaatgcacattatcagtgttttaccggttccgacctcgtggtcacagatcccgccgccgttctgtttgagcatccagacgcaatccttctgcgacggatagatgctcctgattccacggcttgccagccccttgaggttgaggtcgggaaaggtctggtgcgagccgtcgtacttcgggcgcacgaaacagttgaacttgcggttatacatcgtcgtgagccgttccttgaactgcggcgactgctcttccagccattccgagaacccgttgcggatctcgtcaattttggcgttggcgagctgtatgccctcgctgtcgcgcaccttgatgtcgttgccgttctcgtccttgccgatggatttcatcatgtccgggcaggtgttgtgcagggcgtgtttcagaaggtgcataccgtcatagttccggtaatagccctccactaagaactcgtccgtgattttcatggtgcggctgccgcacgccacggaaaactcgtccagacttgcggaataggcgattttcacgtccgtgttgaatagatggctcatgtaggcggcatacacgcccgtcggaatccagcgttccccgaaattgaaatcgaggtcttcaaaagcgatgcgcggcggctcggcttctttcagagcctccaacgcctgcttcacttccggcatacgtccgttttcagggttgccgcccatccatgcctcgatgcgctccgccttctctatcacgttcccggcgatgaacctgtcctttatctcgtaaccggttacgagcgggttgtagaagatgcgtcctttgagggcatcaagcaatccctcctccgtgctgtcggttatctcccgcatatagtcgagattgaccgtgccgaacttgttgagcgatgcggagagtgcctcttcgggagagcttacgttggcatggctctccaccgagaaggaaacgggacggtcgaagatgtccgccttgacgaacttgccgtcctccgcacgttccagcgaaaggatgtcgcgtccggcggcatccatcatcaacagtttcacgttatgcttggcattgaggttgccgtagcgcatgacgaactcatcgtagcaggtgttcaacgctacgcgttgcgcagacccttcatcgtgatactccgcctcgtagcggtaaagccgctcgtatgaatcacggagtgacacatacaacatcgctttctccttctggtagccggtcaggtcaagcggttggaatgtcgcaccgtagggagtaatgtccttcagataaccgatgtcacgtgccctgtttgccaccagcgaaccttcacgcaggtgcatttccggcgtgcggtgatatggacgcggcgtaaggtcgggtacttcctccttcggcttttccgtttcaaattcagggaatagtgaagtggttgctttctcactttggctattgtccgtaacaggaacgggagttgcctccggttgtgcttcgggttgttgtgctgcttccttttgctccggtttgttatccgacgaaggcacaaaggcaggattcatcgtgtccttgacccccgattttttctgctgttcctgtctgtgccgttccgcttcaagccgtagagccttgcgccgttccggtgtcaggctcatcatcgtttcatagaagccgttgatgggcggattggtttcccagtccaaagaggcataaatatcttctgggtcgccttgcttccctgcattttccggctttgcctccttgctttcggttgcaggcttgatggattcaacaggaggtgcagccataacctgcggcttcggtttggatggcaaacgctttgccttgttttcctttttggttgcctttttctttttggcaggttcttctatgggcatcccccaaaggtcaagtagagtgagctgaacggcatttgaatgattcgtttggcgtggctcaatctctggcttttcggctataggttgcggtttttcggcttgggcttcttccgtccgtgccgtaattgttgcttccggcttcatggcaggctgttccggcttggtttcaacggcaaccgcttttcgctcccccgcttgcccgattgcgcccgaatacaggcgcatggcaagcctcatgtggcagtcctcgtcaagcatacggcgcaggtcctccgcgatgcctgctgtcttgccctcgtgcgtatagaccatagcgggcttgccgtaagggtcggtgtcgaacttagcggacgtatgcacgatccgttcgggatggtggacaaaataggcgttgtccgtcaggtttgtcttcgtgtccgtctgtatcacggtcatcagccgttcgtcctgcgacagttccgtcttgagcaggttcttttgcagtacgataaggtcgctgcccacctctgtccccgcattgtccgaaaacaggttgttgggcaggcgtatcgccgataccagattcgcctgacggaacagctcgtcgcgcatggaggtcttggagctgttcaataccccctgcgaggtgatgaacgccacgatgccgccgtcgcgcactgtgtccagccctttcaggaaaaaatagttgtggatggctttttgcgccgaacgcctgccgaaagattcgctcctttgaaacccggcgtcgaacacggctatgtcgccgaagggtatgttggacaccgccaagtcgaaatagttgttgaacggcttttcgattttctcaaaaccgtttatgcgcatctttttgtcggggtggagctgccgcaggatagtacccgtgaggaggtctttctcaaacgccatcacatccgcatcgggactgtgccgcagcacggcgtccacgaacacgccgacacccgccgacggttccagcacgcgggctgggcggacgctgtaatccgccagcacatcggctatggtgtctgttatctctttcggtgtgtagaaggctgtcagcacggacgctttcagcgagtccacataccgcttgtactgcgtatcgtccttgctgttcccgcgtatcagcctgtgcagttccacggtaggggcaaacagttcgaggtcggatgtcgcccagtggacggcgtccgtcaattcccttgcagggttcagaatacatttcaagccgccgaaaccgcaatacttccggagtatcgcctgttcctcggttgtcgccgttctctgttccttgtcaaggacgaatgccgtccttatcgcctcgatgttgtcccgcagccgttgtttgcggttaaacgccatactcgtcgatataaaggacgacggctcccgtcagctccgtgtagagcaggtcgtaatcgggcgacagggcgaaatcgtcgtccgagaggtcatagacggagaatacatttccgacaagcggcagcagcctttgcaggaaggattcgcgctccgattcctgcacttcaccggcgaactcgttttccacgacttcgcgcaggatggcgtacttggagtagcgaagcccctccagcagcgtgcgcatcgccagttcctgcgcaccagaagcaggatagccttcaagcattgcccgttcatacgttcctgcggcacggtcggcgcgttcacggatgaaggcttcatcggtcgcctgttcaaatttgtttgtgcggagataatccagcagatacagaccgtagtaggaaaagtcggtctgtccttcgtttttcttcttgttgttcattactttggaatttagtggattggtagatatgactgggataactgtctgaaaggagaaagaaaaggcactcggtatccctccgagtgccaccactaaatccaaagtatgagtgtaatccggtatcgaagaacagttcattactctgaatcagtggcaaagttaacactatttcttacgtcctgaaaatttcttggtcgttttcctttcggggaacgcgaaatctcgtgcaagtgagagcaaagccaagtttacttggattttgccgaacgccgccgagattgggtgaataccaaagtcgtgttgtagtccccgtcaaaggcgactatggcatcgaaactctttccctgcttgctcttgaagcctttgagcagcttcgtgtgcccgtcggtgagcaggtctttgatctcgtcgtcggaaagggtgcggttcgctttcagccggaacacgggcagtccgcactccgcgttgtcgcagcgtactaccttgccgtagaactgcatactgcccgtcccgcacttgggacacttgcagccggaatctctgcgggcgaacagcttgtcgcacgagagcagctcggaggtaatctcctttgtgtaagcctctatctccttgcggaaggtttcggcgggcagctccccgcgctcgatgcgtgccagttccttctcccattcgcccgtcatggcaacatcggcgatgcgcattgtcttcacgaccgagtagagggcaagccctttttcggtgggtacgagcgacttcttgcaacgttccatgtaaccgcgtttgaagagcgtttcgatgatggcggcacgggtggcgggcgttccgatgccacaatcctttaatgcctgacgcagcgcatcgtcctctatctccttgccagccgtttccatagcggacagcagggtcgcttcggtatgcagcggtttgggcttggtcttgccctccgtgatggagcagcctttcagcggcagcgtatcgccttcccgccagccggggatggcggtttcctccttgtcttccacgccatagacggcacgccacccggcttgcctgatgatgcagccttttgccacgaactccactccggcacattccgccgtgacggtggcggtgtccttgacgcatttttcggagaaagcctcgatcatgcgcccggcaatcatctgatagacggtattgtcttctttggagaggaacagcggcttctcgcccgtgacgagcagggcatagtggtccgtcaccttgccgccgtccacgctgcggcgtgtcggcactgccttcggattgactttttctttccattcgggcaggctgccgatgaaggagagcagcttggggatttccgcgaacacgtcttcggggatgtagcggctgccggttctcggataggtgacaagtttcttttcatagagcttctgcgcgatttcaagcgtctgttccgccgtgaagccgtgcttggcgttggcttccttctggagcgtggtcaggtcgtacaggagcggagtgtcttctatcttctccttgcgttcggctttcgtgactgtggctgtacctgcttcctttaccttattatatagttccgtcgccggctctttctctttccatttctcggaggacgagaatttcaccacttcgccgtcgcctccgtctgcggcgatatgaagctgccagaacggttcaaccgtgaaacggcggttctcccagtaacgtgcgcacaccatcgccagcgtgggcgtctgcacccgcccgacggagtacgtgccgtgtccggcggcgatggagagtgcctgtgtgccgttgatgcccaccagccagtccgattcgctccgcgctttggcggcaaggtagaggttgtcgtatttgtcgcccgcttcgaggttgcgtaatccctcgcggatagccttgtcggtgagcgagcttatccagaggcgcacgaaaggcgtggcgcatccggtgtaatggtagaggtagcggaagataagctcaccctcgcgccccgcgtcggtcgccacgatgatctgttcgctttccttgaatagccgggcgacggtcttgatctgcgacaccacgccgctgtcgggcttgtagcccttgtccgtctttacctgacggggaacgagcgtgaaggtatcgggaatgacgggcaggttgtcgcggacgaagccgcgtatcccgtagccgtcgggcatggcaagctggacgaggtgtccgaacgcccatgtcacggcgtagccgcctccctcgaaatatccttcctctctctttgtagctccgacgatgcgggcgatctcacgtgccacggatggcttttcagcaatgattgtcttcatgttttcttggattgatgtttataaatgttacttcggattcagtggtggacacggggttacatcctcatgcccttgtttctctttttgccgttctcctgctgctgttgctgcgcggtgtccttcggggcggtctgtcctttctgcaacggctctttcaggttcttggtcgcctcgttggttttgccctcgctgttcaccgccacctgcgtgcggctctcgttggagggtgcgaccttctgcgcgttgtcggggtcggtgtcgtagcggtacgggcgtcccttctccgggttgaacctgatgtacatcgtggcgtggaagccctgcttgtcggtcacgttctccagtttcacggctttgcccgccacgtagtcggctttctgctgctcggtgaactcaacgccgctccatttgctgatggggcggatgctgccgtcggcgttcgtccacgagttgcggcgttgcccgttctgtatggctgcggcgttctccgcgtcctgtgcctgtccctgtccctgtgcggggttgttcttcgtttcctgcgtctgtgcggcacggggcgacctgccggtccccggcacgaactccacgccgcgctgctccacgttcacctgaagggtggtgacgaacttcctgccgtccttgcgctcgataagtttgtcgcgcacgggcagcccggcgcggagcatgtcctgctcctgcttggtgatttccgtcttgccgatgcgctccggtatgcgcaccttgtttgccgggatgtcggtaatctcgttcgtcttgcggtcgatgctgatgaacgaggggatgatctcgcccgtttccctgtccacgagatccacgaccctgccgaggttgcccgtttcgcgcaggttcttccggtcgtcgtccgagaacttgtgttccttgtactcgtcaagtttctgctccttgcggatgaaatgcggcacgaggctgatattgccctcgccgtctttcttgaaggagaggcgcgcgtccagctcgaaagcctcgccgccaaaattgggcgacactttcaccaaatcggacctgccgtagttgagcatcttggtcaggtcgccggacttctcaaggtcgtcacgtttcacgccccatttctcttccagctcctgccagttgatcttgctctcgtcgatgggctggtagccccggttgccctgcgtctgctgcgggctttcctgattctgttcatttttctgttccatctcttcctgttttttaggttcttcctgtttctgttcagtttgttccggcttttcagccgcctgttcttcctgcaccttacgttcgtaatccgaggtgtccaccttgtgggaggcgagcatctccttgttggcgtcggggtctttgagcagctccttcatcacctccagcagcttgtcggcttggtctgccgcaatccggtagaaaccgaagcggctgggttccttgcactgccggaagaagttcttgaagaaattgtccagcacgtcgccgtggcggtcgaattgcaggaaactccgcgcgttctccgctttcgcgggggtgcgcttgggggagccgtcggcattaagcccggctaccacgctgatctcgcccgtcttctcgtcgcggactatcagcacgtccttttcagttgttttctttgccatttgaaaaatgttttaatggttatttttgaaagaaattatggatacgagccttgtagaaggctatatcttcttttttgaagtcctttacgtgtccggaaaggaacgtcagcacgtcctcctcgctgtaataggtctttttgccgagcgtcttgtacggcagtgcgccgatgctgcggtagcgttgcagggtgcgcttgctgatctggagcaacatgcagaggtcctggttgtcgaacatcctgatacggtccatcgggtccggggctttgccggacggctgcaaggaaagcagcagttcgtcctgacggtcgagccgttccgtcagtttccgcatccagctctcgaaattgtttcgggtaagcagttccatacgtcacgtcctccttcctttgggtttgccgccgcccgtacgcagcgtgtggttgtgtttcagttccgtcggtgtcgccgcgtcctccaccacggtgcagtccgcaagcaggcggtcgatttcagactgccggtagcggcacttgccgcgcagcaccacatagccgatgcgctgttcgctgcgcatgcgctggagggtgcggcaactcacgttcagcagatgcgccgcctcgcgggtggtgagtagcctgtcgggggattctaccttgctttcgccggaaacggcacgcacgtgtgccgctatctcggctatctgttccgtcaatgcggtgaaggcggaactttccatcgttatcactttcatattcagtcctttcttttggtttctgtggcaaaattcggcaataaaccaaaggggctttaacagctcactacgtgactcacgtaagatttttatgggaaatggctccgtaacccggacaggcggcgcaacaagctgccttttagcgggaaacgatatgcgttcacggggacgacattacctttgcggcaaactctgaaatgttttgcttatggaaatagtatctatcgagaaaaggaccttcgagatgatggtggcgtccttcaacgccctctcggagaaggttgccgccctgaagcgcaagagcgacggagggcggctggaaagatggctcacgggcgaggaggtctgcgggcagttgaggatcagcccgcgcacgttgcagacgttgcgcgacaggcggcttatcggctactcgcagattaaccgcaggttctattacaagccggaggaggtcagaaggctgattccgcttatcggcacgctctatcccggcggcagataatcttattattcacccactgaatccaaagttatgatgaacgagaacaatgatgtttttacactggaggacgagccgctcgccaccgtggtgcagaacatgcgcaaaggctccaaatggctctccgcatttctggaaagttaccgcccgccgctggacggggagcgttacctgacggacagggaggtggcggaactgctccgtgtgagccgccgcaccttgcaggagtatcgcaacaacagggtgctgccctttatccttttaggaggaaaagtgctttaccccgaatcgggattacgtgaactgctggagacgaattaccgcaagccgatggaataatgttccggcatttcggaataaaagcgtacctttgtagttaaaacgaaataccattatgcttcggagtgaatttgcaaaattgttagaatccacaataattcctgaaggaattgagcaagaggatataaaatcccgaatatatcctataagtacagcattgatgtcaatgttgccacaaaaactgtatagatataggagttgttcaacattaaaccttgatgcttttgacaaggatctggtttatgctgttactgctgataagtttaatgatccctatgacactcttgtttattatagtttggataatattcaagagcaaatgagagcttgttgtacagaagaatttcttgaacaattcaaacagatacttgaagctaaagatttcgattttcctccaagtgtaatccaattttttggaagaaacaatttggcaggtttaaaagaacaggtaatatcgtgtaatggtataaatccattgacattagctctttttagtgttgcaatggaaaacatattgaaagaaatcctattaaaaatgggggatacattaaaggtcgtatctacaatagcatgtttaagtgaaagcattgattctgttataatgtggagccactatgcccaaaatcatgaagggtttgcattggaatatgatttaaggttcttattggaacaaggagaaatgaattgttgtattttgcctgttatatatgataatgaccgttttgatgcaaataactttattcaatggtatatagcaaagagtttggggctggatgttaaaaatatagattcactatcacatttgaaaatggctattcacaaatccacacagtgggaatatgaaaatgaatggcgtattattcattcagagaaacaacctgccgcacattctcgtgcaacaagcctgaaaattgttcctaaagcaatctattatggagagagaatttcaaacatccacaagaaaattttgcattatatagcacaagaaaaaggaattgcggaatatgatatgtacattgattgtggctcgttaaagtatgagatgttatataagccatctcaattttgatacctcatattctttagcacataatttgtatattccaaattgactatcttaaagttaaaacggacagcttgatggttgtccgtttttaattgattgtcatcgtcttttcagcagtaaccgccttttccgctatgtacgaataccatgtaggcggtatgcttgtcttttgcgagtgccttgtccatcagccagcggcggaaaagatgggcatggtatgtgctcagccggaaggtgacggggatgattatctcaagcgagtaaacatccgcatacagaccgttgtcaagctgaatgtagcggcatacctcgtaatcgctcagtacgtccgtcttgcggacagctttgatggcagcgttcactgccgggacacccgtgtggaacagcccggcgatttctccggcggtcatccatatctcgttaccggttacgcggaccgccttgtcctctatgatgattatgtcacgtttcatggcttctctgttttagatggtgcaacctgcaaattcctcgatttggttcaatcttgcggcaaggttctccatgtcttgattgagcttctctttggttattttcgcgtatatctgcgttgtctttatgcttttgtgtcccagcatggaactgaccgtttcgatgggtacgccgttggagaggaacaccgtcgtggctgccgtgtggcggctttgatgccatgtaatatgcttggtgataccgcaacgcttggcgacggcacggattccggcaagacacgtgttgtagtggggtacagggaaaatcctgccgttttcgcacagcccacggtatttgtagatgatgcgcttcgctatgtcaagcatacggatgttggacaccacacccgtcttctggcggttgatgtttatccattcgtgttcgtcaaagtaggtacggatattctcttccgtcaggttgcgcatatcggcgaacgacaagccggtgaaggcacagaacaggtataaatcacgatacagttcttgcttcgcattcttcagcttgccttctatcagcaggcggatttcatctttcgtcaggaagctgcgggtcgtttcctccttcttgatttcatactcgcggaacgggtcgcgcgtgagccattcgttgttgatggcgatgaacaccattgtccgaagtgggcagacatacagccacacggtgttggtgcagcagtgtttgtccgtgcgcaggaacatttcaaaatcggaaatgaaagcgggtgtaagctctttcagggcgatgtccttcacgtggtaacggatggcgatgaactcttgcaggtgcttgtaaacggtcttgtacttcaagagcgtgcctttggctttcatgcctgcctccacctgcttggcatagtcctcgttgtgctgccggaacacctgcaacagcgtgtggtagcggtgttccagtccgagaaaggcgtttttcaccttttccgcagtgacgaagttgtcacgctccatgatttcctgataatgcctgttgatgcgcacgcgcatcttgtcgagcatacggttcgtttcgagtgccgccgtgcttctgcccgtgacacgtccccctttggtgtcccacagtttgggatcgacggtcagtttgcagctgaactgcgtctggctgccgtccaccgtgatgcgtcccatgacgggcactgtcccgtcctttttcactacctgacgtttgaggtagtagattactgaaaatgtactcttcatcgtccttaatttttttaggttcaaaattagtcggtgaagaatccttcgtcggtacgcaaaacacggaggaacggcgcaatctttttccgtaaccggatttgtcgcgtgagttgtcagtaactcactatatcacaatgccttgttttgtcattcgtacccatttcatcatctatttggcgtggttacgaacaagtaacgtagcggcgtcttgacttggcttcggcaaggattgtggtggcgttggagataatcggcagcttaaatgaaaccgctgtaaatcaattctattacttcattcttccgtattccacttttttgtagtaactttgtgatataaacatatcggttcatatttttcgttttatgattgcaaagctcgtatataaccgtgcagtgtttctgcacaatttactcttctattgcattttctatgtcttcaatacttggcagtttctctgccagtgtctttttcagtacttcatcaagttcataggttgctattcccaacggtcggtcgatgccttcaaaagcccatttaaccaccgtctcgtttttcgacttgcataccagcagtcctatactggggttgtcattatcatctttcaaaagatggtctgccgccgacacatagaagttgagtttaccggcaaattcaggctcaaattccacgacttttagttcaagcacgacatagcatttcggctttgtatgatagaataccatatccggaaagtagctggttccaccaggcatgcgaagttccatttgacttccaacgtatgcaaaacctgtacctaattccagcagaaaacgacggatattgtgttctaaggcttcttcaagcatgtgttcattgtatggttttcgcaatgtgaggaaatcgaagttataagggtctttcaatatttcttgtgccagttcatcttgtggttgtggcaacttatcgttgaaattggtctgcgcttttcctcgtttttcataaagacttgctttctgcatattcatcagcgtggcgcgactccagttgccggcaatcacttcgtttatatagaataatgcttcgtccacagtcttactcttggccatgatttcaatgtgatgtccccagggcacaagagcgaatttttgtggcatggataattcgccaacaagttgttggcaaattgactcatcatcgcttgtatagaatctgaaccactgtgccgcataccgcaagttggtgtatgataatcctttcataccaggaaactcatctcgcaaatcaaagctgagctgttgcaaaacaccacttccccatgcttgttccgctttcatctttacaatgtcacgacctaagctccaatagaactccagcagcgtgctgtttactttgatggcggcttttatctgactgtttcgcaaacgagatttgatatcggcaaaccattgcttatattctgcggttatagcaaatttatctcgctttacgaaatgaggttcttcttcttctttattgcttgttttcatggtcttatgctttatgtgtcagcttacttttatcttgcctgtcactacgttggtaatgaggctttgtttcagttcttgaagataagcaatttttttcttttgggtagcgataatgtggtcaatctttgaacattttgtatcaaggtaggtggcgatttgttgttgctcggaaagaggaggtattggaatctttgttttattcatatcacccattgtaatgtgcatcattgtacttccatgcatatcgctcattttttgatttgtcactgctcttaataaataatatgaatacattttatccattgatgtagccagttgcactttccatatatggtaatgatatattgtttttgcttcattccaaatatatgggccaactgaagctgaccaagcatatagtaaatcatccttatcacaatacttatcgggttctagttccatatttgaatagtaccacgaatcatttgtgaagaagtttccaacacgaagtaccttgtattttccacttggtagcaattcgttttgtgaatacgcacgtccgtttataagtcttaagaagaaacgtaaacaggcgatgtcccagtgcataggaatattaccaatccagtttacaccactgtcttttagtggcgtatttggattcaatccccgtgtcacggcacgagtgataagtgattgtttaagttcaccaagatattctattttcttttctgccttagcaatcatcttgtcaatcttctcggtcttagcatcaaggtagatggcaatttgctgctgttctgctaatggtgggaatacaatgggattattgcataaatccgattgtgtcatactgggcagtgcagttgatgttgagtataagttaaatggaaatattgttgcttgatagtatatatatttgccacatacagctttacgaggtatgcagtaaaacatcgtgtcgacagaccaaaactttcccttaaaatacaaaggtttattgatagttccctttcgtcccatcaaaatgacctcgccatcataaagatagttactcgctttggcaaattcgccgcctgaccctattacaggaaaaccaccttcatttacttgaacatccttataatctttgccattttttattataacagctcgcttgtatggtacaatatcccaatgattaggtacattttccaaccaagcgataccgctatccttataataattatcgtactgtttcattacctatctttttaatcattcaacaatgaagataattcctgttcttcatcttcttcaagtgcccgaatatccgcaaggatatcctctactgagcgtagcggctgatattcataaaacagttttgaaatagggaactcgcaacctatcttatctttctctctatccatccatgcgtcaggagcaaagcggaggacttcgttttgaaaatactcttgaatatccgtcttgaatggaatcgattcatagtcacgcaaattagtgtcagcgaccaagtcactgttatcatcaagtggtatgacgtgaacctcgggggcagtttcacacacttcaccaaagaaggtgcgacaatctttgataagttttgcggtagtctttatcttttttgactccaagtaagcaaagaactcagcatcggtgcgctctatatcaatatcgtccaatgtaacgatgtttgccaaagcttcgttttgtttcttttcatcgagcgcagcatactttgtcttcacatccttgtatataagacggagaggacgttcaacggtaatataagtatagaagaaatcatccttatccataagttttgcattgtcgcaagtctcaaaagcatggtagatacgacctatttcacttcgaccgtaatcgctgaccaagacatttttcataccgagattcttgcgcataggctgtacgtactcgtctttagctgcatttatcagtagcactttattcttgtggctttcgggtttcttgttatcaaatatccaaaggtaggtagcgatacctgtgccatagaacaaaccgccgggcaaagcaatgatagcgtcaagtaaatcattgtcaagcatgtgcttgcgaatattgctccagccggaacctgcaccaccgttaaacaatggtgagccattagagagaatgcctacacgactgcctttggggtccatcttatggagcatgtgcaaggtgaatagtaactgaccatcgcttttgtcgggcagtcccggagcaaagcggctgtttttatcttccgcttcggcagaaacggagtcgtattcacgtttccagtccacaccgtacggagggttcgccagcataaagttgaacttttggtcgcggaactcatcgacaagaagcgtgtcacctacagcgatgccctttgcttcgtcccctttcatgatgatatcactcttgcagagtgcgtatgttttgtcgtttaattcctgaccaaacaggttgacggttacatccactctacgctcctttgctgtttcttctatggtgtccttggtcaatgtcaggatgccgcctgtaccacagcaggggtcatacacagagattatcttcccatcttggtaaatcttatcttcttggccgagcaaggtaatctccgtcatcaagcggacgatgtcacgaggagtatagaactgaccggcaccgatacctacagattcttttgcgtaacgaatgacaatttcgaaaacagtacccatcatgtggttgtctactttgtcgggactgaggtcgatgttcagtacaaaagctttagtcacttggagcagcaggttcttgcgggcaaggtttgagaagatgtcgctcaggcttgcgttttcacctttaccggtgaagtttttcagaatctcacggatgtttggactgaaaccttcaaggtaggtcttaaagttgttcgtcaagtcggcaggaactgttatcaacttagagagtgacagaccactcgtgttgtagaatttgtagccggcagcatccatgagcatcggcatcatattgtcgatatcctcttgtgaggtttgaccaagttcttcaagctgcttcatgttagttgccacaagggcctctgaacctacaagtacgcagtccagacggcggaggagagtgaacggaagaattacatcctccacgtccttattgtcatatacattgcgaaggagctccttcacgttccatatcatctgacctaattcttctgctgtcatattggatttttcattgttcgtttctagtcatattgtgtatagtcttttactcaaatacaaaaatagtggattattctcaaattcttttctcgttgactaaaaatctatttccgtttaccaatgtctttttccaagttgcttcttgggcatagctaagactttttatacggatgactaattctttttatacagcatactaagacgccccattgcaataggatatacgtcctgctgtcgtaggatgtagtaaacatttgtataaaaagccttaataatacggaagaaaggctttatatctgtgatgaagttttaggggatcagcaacgaactgtctccatagctcaggaacctgaaatcatgttccaaagcatagtcataaatctttcgccagtttcctctcacaaaggcagaaaccaatagcagtaatgtactttgtggttgatggaaattggtgaccattttccggactattttgtattgatatcccggtgcgatgataatttgagtactgctatgcaacgcttccatttcgtggcggtgcagataatccagaatttgttgcagggcttccactggagtcagttcattcttatcttcatagggcatccattgctgtacgtgcaattcgttttgggcggcatcagggttatggtggataaggaccccgatataataaagactttccagggtgcgtacagaagtggttcctaccgcaatggcttttccattatgggcgattagtttttcaatggtatgcttgcttacagaaatgtattccgtatgcatctcatgtccctctatctcttcactttttacgggcttgaaagtacctgcgcctacgtgtaaagtcagttcctcacggtcaattccccgttcgtccagcgctgccagtactctttccgtaaaatgaagccctgcggtaggagcggcaacggaaccttttatctttgaatagaccgtctgataagtttccttgtcactttcttgtgtttcacggttcaggtagggagggatgggcagttcacctattacttccaacaggtcggcaaatgtgattgaatcatcatcccatgagaaatcaatccaatgactggttcccctacactctccacgggtggcggacaggacaatttgctttcctttcacatccaccacgcggcttaacgtaccttttttccattttttcagattacctatcatgcatagccagctgcaccggcgtgtttgttgaaaacttagcacatagtcattgggctggataggttccagacagaagacctctatcaatgcccctgtttctttacggaaatgcagacgcgcttgaattactttggtattattgaatatcatcaattctccggattccaaatattgcggcaaagaagtaaagacatcttcgttcacctcaccgtggcggtaaactaacagtttggactggtcgcgtgtggcgagggggaatttggcgatccgttcatcgggtagcgggtagttgaactcacttattttgatatgtttggtatcttccatctgaatctatttctttttctgcgcaaaagtaccgatatttgcgctaactaaaaaagaaaagagtatgaaaataggagataaagtccgtttccttagtgaggtagggggcggtgttgtgacaggatttcaaggaaaagacatggtcttggtagaagatgccgatggttttgatattccgatgcccataaaagagtgtgtggttatagacacggatgattataacatgaagcgtaaacccgtagctccggctcctaaacaggaggttgtcagtgcaaaggcaaaaggagcgtcagtcaaggtacgtcaggatgaagaggaggatgaacgtcccattacttatcgtccggctgagcgaaaagggggggatatcttgaatgtgatgcttgcttttgtaccacaagatctcaaggccatttcagcaacggcatttgactcgtatcttattaacgacagcaatttcacattgtactttacttatcttactgccgaaggaagtaactggcgggtacgtagccatggcacggtggaaccgaatactaaattctatatagaggaattcgagaaaagcgctttaaatgaattggaaagggtggcggtgcagttcatcgctttcaaggataacaaaagctttttgttcaagcctgccgtatcggtagaactacgtatagatacagtgaagttttataaactgcatactttccgtgagagtattttctttgaagaaccgtcacttatttatgatattgtgagagatgatgttccggtgaaacaggtttttgtttcagcggaggatataaaggatgcattgctacagaaaaaagaaccggaaccgcaaatggcaaaacaaccacaacccaagaaggtgaagagtgaaattgtagagattgatctccatgctcacgagttgctggatacgactgccggtatgagcaatagtgagatattgaattatcaattggatgttttccgcaagacattggaagaatacaagaacaagaagggacagaaaattgtctttattcatggtaagggagatggtgtgctacgcaaatctatcttgcaggagttgaaatataaatataaaaactatgaaagtcaggatgcttcgttccgtgaatatggtttcggggctacgatggtgattattcactaaaagtctttcattcatacagattgtaatatgacaacattgaaagaatttttgaagacggatcgtttcgctacctgtacgggagtggaacttcttgaaataaagccgggttatgcccgtgcgcgtatggaagtgactgatcgtcatctgaacggaggaggggtatgccaagggggagctttgtttacattggcagatttggcttttgccgctgtggcgaacagccgtaagaagcttacactttccgtgaatgccaatatcacttttctccgtcccgccaaactaggttacgtgtatgccgatgctactgaggtgttcaatcatcatcgcattccttttgtcgaggtgaagataacagatgaacaaggagaactgatagctatatttacttcatcaggctatcgtaaagaatcagatttgccggtagatacgttagagtgattcacgagaataaaaaagcctgttaccgtttttcggcagcaggctttttaatggttatcggtgaagataatgtttcgttatcctatccttcttttactttagcttttcctattcttcccggttctacaaacagatatttgtagcctacacgaatacttgccagatgcagtgtttttaaatgtgcgcggcgtactagcagagcggtcatttcatgaatacgcccgtcaacatagcctatcatctcactttctgttgtgttttcagagccgtaagtacctgctccttgaacaatcataaaaggtgattcggtgcctgctttatccataccgatagcaatagccacataaatccacataggaccatgagcaactactttacgtgctgtggctgtgcggctttcgccttttgtcagtgtcttgtggcaacagccttctatggatttgattttctttcccaaatcatatacggttactttgtcatcggcggcatccaaaggttgctcgaataaaattgtgtcttttttgtccggatagctgatgtgataacattcatattccggttgcattcctctaggttcatcatcgcccacggaacctgctacaagtttaacttcaagaaaagagccgttcagggcggtttcatataccgcatccgtcaaagcggcgttactggttaattctaattctttcataagtcaaggtttttaataagtttctctcataacattaggtggaaagaaaagttcgaaatagtttgataaggaacaaaaacgggtgttaatagatgaaataaggagattggtcgataactcttgtctcaatgataataaagctttaattttacttgtggaaaaagaaaaagtttgagaatcaagattgagtagaagaaaggtggacggattattagtttgtctggatagagggatcgatatggttgtaggaaggatatgaagaggcagttttataaatacgttaataataagtttgttagtaaataaggtcggatgaggctttgtttataaggaaaacgctcgttgtgaaacgggcgtttttgattttgtatcagtatgtgtttaaaagtaaatcctacaaaaaacgttctattcggtgaagaatagaacgtctttttatagaatggaatgaagtttacaaacgatagtcggctaaatcatctgcttttattttacggatgaaattgaaatgtttttctatttcagcttctgcatagtttacatatacatgggctgacttggcgaacaattcaggtgcttttgtcgcatcttggataagaagatgtgacatgatgcatacggcagccatttcataaagacggcgtgcaacgaaatcaagcaactcttgattctgggcctcttttactgcattagtgcatgcgtcaaatttgttggccatttctttcacacggtccatcagcagttgcatttcttcactgcaaggaatagcctcgtaattacgcaaggttgcgatataagaaccgttggttacataacggatagcggctacagtctgcaactgggtcgttccttcgtaaatgctggtgatgcgtgcgtcgcgatagatgcgctggcaagcatattccatcatgaaacctgaaccaccgtgaatctggatacaatcgtatgcattttggttggcatattcagagttcatacccttggaaagcggagtaaaactgtctgctagcttggcgtagactttttgttcctgacgttcttcaggagtcagtttgcgttcgcgggcaatatcatccaatgctttgtaaatatccacatagcgtgaagtctggtaaagcaatgcacggcctgcatccagtttggctttcatgatagacagcatgtcatatactgctgggaaatcgatgatggcttttccgaactgcttacgttctttggcgtatgccagtccttcgttgtaagcggcttgtgacaaacctactgactgggcggcgatacccagacgcgcaccattcatcaaggccattacgtatttaatcaaaccgagcttacggtcaccgcaaagttcggctttcgcgttcttgtaaaccagttcgcaggtaggagagccgtggatacctaatttattttcgatgcggcgtacatctacacctccttcgtttttgtcatagatgaacatagacaaaccacgtccgtctttggttccttcttcgctacgtgccaataccaggtgaagattagcgtcaccgttagtgatgaaacgtttcacaccgttcagacgccagcagttgttggcttcatcgaaagtagctttcagcattactgactgaaggtcggaaccggcatcgggttcggtcaagtccatagacatggtttcacccgcacaaatacggggaatgaaacggctgtgctggtcttcgttaccgaactcatacagcgtttcgatacagtcttgcaaagaccagatgtttccgaatcccgcatcggcagcggcaacaatttccgcgcacatggtgtacggggtgatggggaagttcaagccaccgaaacgacgaggcatggtcataccgttcagtccggcttttaccatagcgtcgaggttctgcttggttcctgaagcatattccacacgtccgtttccacagtgaggaccttcttcgtctaccccttcggcattgggagcgatagtttcacctgtaatctcacctgtgatctccagaatcttatcgtaagagtccattgcatcggcataatcctgcggtgcataatcgaactcgtctttatctctatagtcgcgctctttcagttggcagatgcgctccatcatcggattgttcaagtgatacttgagttccggtatatcggtataaaagtttgccattacttactgttctttttataatacttaatcaatttcggaacgacttcttccacagtgccgttaatcacatagtcggcaatggtgttgatcggagcgttcgggtcactgtttacagagatgatgatacctgcatcctgcatacctgcgatgtgctggatttgtccggagataccgcaagcgatatacagtttgggacggacggttacacccgtctgaccaatctggcggtcatggtctgcataacctgcatcgacagctgcacggctggcacccacttcggcgtgaagttctttggccagttcgaacaatttgtcaaaaccttctttagatcccattccgtaacctccggcaatcacgataggtgcgcctttcaggttatgtttggctttttctacatggcggtcgatgacttttactacatagtctgtttcaggaacaaacttggcaacgtcgtggttcaccacttctccctggtagctttcatccagaatctctttcttcatcacgccttcgcgaacggtcgccatctgcggacggtgctcggggttgacaatggttgcaacgatgttaccaccgaaggcgggacgaatctgatacaacagattttcgtaagtgatgccatttttcttgtcttcgtgggtaccgatttccaactgggtacagtcggcagtcagtccgctagtcaatgcggaagatacacgtggtcccagatcgcggccgataacggtagcgcccatcagacagatttgcggtttttcttctttaaacagattcaccaagatagaagtgtggggcagtgaagtataagggaacagacccggagcatcgaatacatgaagtttgtctactccgtagggcaatacttgtttttcaattcctgcaaggccggttccggcagcgattgcctcaagctggcagcctaactgattagctaatttacggcctttggttaaaagttcgagactcacatcggccactgttgtgccttcaatctcgcaatatacaaatacattattcataatcttatcctattgtatggttagctaacagttcgacaatcaatccttccacatcctggtcgcttcctgtcatggtcttgctttcttttgcctggaagacgatgttttcaatcttcttcactttggtgggagagcctgacagaccgcactgcttggtgtctccttctacatcggccacactccattcagtgatattcaggtaagggaatttttcatatagttcagcgtaaggcagttcagaaccgtctttagtgatggctgctttttcctgtgcaccgagagcgcgtttgtatttctgtaacaatttggcattgcgcggacggcagggagctgcacttccgttcactgtcagtacaataggcagaggaccttccactgtttctacccctccgtcaatgtggcgttttacagtgatgcggcgggcagtttcgtccacattcagaatttcttccgtataagtaatctggcttaaccccagtttttccgctacctgcggacctacctgtgcggtatcaccgtcgatagcctgacggccaccgataatcagatcacattcgcctattttgcggatagccgtagcgatggcgtatgaagtggccaacgtgtcagcaccggcaaaagcacggtcggtcaataaatatccattgtctgctcctctgtataaaccttcacgaataatttcggcagcgcgtccggggcccatggtcaggatagttaccgtagaaccgggatgtgtgtctttcagtctgagtgcctgttccaaggcgttcaggtcttccggattgaagatagccggaagtgccgcacggttgatagtaccgtcagcgttcatggcatctttccccacattgcgtgtgtcgggaacttgttttgccagtactacaatttttaaactcatatactttaatatatttggtattagtaatattccgacggcaaatttacttaaacaatttgagcgacaaaaggatatggggagaaaatatgcacaaaaaggtgaggtttgagcatgaatcgaggaggatacaaatgtttttatgataattctattgtaaaataaaagcggaaatgtttgtttaagtggaaagtttttatgttctttataaaaagtgatacaatgaaaacattcacctccaaatgcaatcaaactaaatggccttcgtggactgtctgtttctgatgatagggacagacggtatctttttcatcatatatctttgaatcatcatgagatatccctattttaaacttaaaaaaatatattatgaaaagaacacttaaaatggcattgattgcctcattggcagttggtggaagttatgttttgtatggttctcgaaacaaagaagaattgtccgatttagctttgtcaaatgtggaggccttgactttaggtacgaaggattgtatatatcaacgtaattcacgttgttatgaactcgttgtaggtcctccgggcgaacctgttattattgagacaagtaaggaagcaaattgggtaaatcgatataccattcctgagtaattagacatttatgtaatacgggacaaaataaataggcattaagcatttgttttgtcccgtttgaagagtattaaaattatgattaaaataaaattgtattattcgattgttgccatccttttttttatttcctgtgtcagtaacaaaggaaatgactttttatctattcccaccaaaccgatctatggcttttattatgataaagaaattatctccaatgagttggttacattctcttctcttgattgtggaattcttatggttcaacgttgtaaattttccggtgaacctatttgtcagattctagaggaacagacaggcgaaagagtgggtagctttggaagcagtggacaagggcctggagaatttgtagctgctgaatttattggaaaaacagagggggacgatactttatattttgttaatttgccttctactgtcctgttgtatgcacgggaggaaaagagtgctgattcaccgatggtgaactggtaggcaagtacgcattggaacaccaaagcatgagtgtgcttctttctcaatatacccctcggttgtacttgttaaattgtgaatcggaatgtaatgttgaaatatttgagatggatgatatcctgaaagcaaaattatgaaaatcctgctttatgtgttgttggcttttggggtattttgtttcttctcgtgtaaaaggatagaaaaggagcagttgacttttttgatgaaagaatggactcgaaaagaaattctctttcatgatagagctgttttatgctgggagacaatatacaccattcattggattcacgacattggggattggtgcctgatgatttcattgtgggtgtagtacaatggatttggtattcaaaagatgaagagcaaaattcaattcgttggaatcgaatcggtagagtagattgaaataagagatgcgaaaggttatagttctatgcttgttcggataaaaacgtataaatgatgcgttgtgatatatgttgtatgaaaagtttttgttaatattgtcatcattatgagtttgtttttgttgtatgatgaaataataactgaagaattatgaagaaagtattgtttttattcgtctttttgcttctgagtgtaggagctatggcgcaaaaggtaatttacgatgaaaccaaccagaccggagtgcgtacagtggtatgcgagggtatgaatctgggtgtttccaataatatggacgtatatgtggcactcgctggatttcagtataaaagtaccatacgttattcgctggctgttactatcgggtcggggcatgaggtggaaattcttaatgacagtaagtgtgtcctgacgttggataatggaaagacattagagctgcctacggtagcaggcggcgcttccgtattgcagcatgtagatgtggagatgagtgatgtgtatcaaagtttccgccgttttgcctattataatataaaggctaaagaattgaagaaaatcggcaaaaacggtattgtacaaatggatatacagttatctcccgaaaactattccattgcatttaatcaggatgtcttgggaagtatgctgactggttctatgtcattaataaataatatgtttggtaaataacttctcttttcatattttatggttcagccttttcttctcagaaggagaggctgttttgtttttgaaagtcaaagggttaaacaaaacgttgcttcatgtgttttcctaatgttttttaatgtgataaacttatgaggaaaatacgtagatggggagcatggctccttttaatcattcctttggtactgaatgcccagcagcggaccgaaaaattattgaatgtacccttgccggaacattggcaagaagaggatgcgatgtttcaacaacagcttccggtggatgaccattggtggactgtatttcaggatgccacactggattcattgattcatgtggctgtcaggcagaatccgtctgtccttactgccttgaatcgtatagatatggcgaaagcgaatctgaggatagccagaggaggctattatccggctttgtcattggatgccaggtggaaccgccaacagactagtggtaataccggtacgggacagcctcaatccagagtggggtattatgatgcaacggttaatatgagctggcaggtggatgtgttcggttccatccgccaacgggtgaaagcgcagaaagaaaattttgcggcaagtcgtgaagagtacaatgcgacgatggtaagtctttgtgcagaagtggcgtcagcctattttaatttgcgtgaggcccaacaggaactcagtgtgttacagcgcaatgctttatctcaaaaggcggtagtggatataactgaagtgcgttataataccggattggcttccaaactggatgtggctcaggctaaatcggtttattatagtacattggcttctgttcctgctacagaatccggtattattcaatatatgaatgcattggctgtattgctcgggctttatcctcaggatgtgacggctgcactggaaacgggaaaaccgttacccgattatatagagccggtaggggttggtcttcccggacaattacttttacgacgtcccgatgtacgggttgccgaacgtcaagtcaatgcacaagcagccctgttgggagcttctaagaccgattggcttccctcattttttctgaacggttccttcggctatgcttcacatgatatgaaagactttactaaacgtagcagtatgacatggagcatcgctccctctatgagctggacgatttttaatggtggccggcgtgcgaataatgtacgcttgcagcgtgcacaactggatgagacaatcaatcagttcaatactacggttcttacagcagtgcaggaggtggataatgccatgagtagttataagaattccattaaacagattgtggcatgtcgtgagatgctgaatcaggggaaagaggcatttaaactttcattggacttatacaaacaggggctgagccctttccaaaatgtgttggatgcacagcgttcgttactgtcatacgagaattcattggtgcaggcacagggatattcattgctttgtctgattcagatgtatcaggcattgggtggaggctggtagactgtgacggaaaagttgttgaactatagaaataataaaaaacctaacccaagatatgaaaagaataatgataactttcgcatggacggtatgtgtgctcaccgcctgcgataaaaataaaccttctcagacaggaatgcaggcattgcctatagatgtagcgaaacctttggtggaaaatgtgacgctgaccaaagattatcccggttatttggaagcgaaatccactgtagatttggtgggacgagtaaatggaattttacaatccaagaattttgcacctggttcccgggtacgtcagggacaggtattgtttgttatagaaccgacactttatgaaaattcagtgaaacaagcggaagctgaattaaaaacggctaaagccaatcttgaatatgctgtcagtagttatcaacgtatgaaagaagcgataaaaagtgatgcggtgagccgtatacaatatttgcaggcagaaagccatgtcgttgcttgtgaggctgccgtaagtaatgctgaagcagctttgaaaactgcgcgtaccaacttgagttattgctatgtcaaggctccttgtgatggagtggttgatgtatcagcttattctgtcggagcatacatcggtggtgctttgcaaccggttaaattggctactgtttataaggataaccgtatgtattcctattttaatattgcagataaccaatatctgacatatgagctgacccaggaggctgccagcaagattcctgcagaaactcattttgtaaccttgcgcttggggactgacggggcacaggcatggaaagcgaaactagattatctttctcccaatgtgacattaactacaggtactctccgtttgcgtgcggaattagataactctgacgggaagcttcgtcccggattatttgtcagtgtcacgttaccatacggtgaagcgcggaatgcagtgctggttaatgatgcttctatcggaacagatcagttgggcaagtatttgtatgtagtgaatgacagtgatatagtgaattatcggcatattgaagtcgggcaattggcggatcataatatgcgtgttgtaaaaagtggcttgtcaccttccgaacgttatgtcaccaaggcattgttgaaagtgcgccaaggcatgaaaattaaaccgatagaacaaaccaataaacttcaatagccttatgttttcaaaatttttcatagaacggcctatatttgccacggtgctggctttgttattcgtggtggccggacttgtaactctgaatatattgcccgtggcgcaatatcccgatattacgccgcctaccgtgcaagtcagtgcggtatatccgggtgccaatgctgaaactgtagctcaaactgtcggtatccccattgaacagcaggtaaacggtgtggatggaatgttgtatatgagctccaattcctccgcatcgggtacttattcgctgactgtgactttcgaagtgggaacggatattgatatggcaactgtaatggtacaaaaccgagttagtgtagcgttgaattctttgcctgaagctgtgaaagtacagggagtgacggtgcagaagcagtcatccaatattgtgatgatgcttacactgagtggtgatagtatttatgatggcctttatctgaccaattatgccaatttgaatctggtagaccagttgacacgtgtgccgggagtaggagcggtgaatgtgatgggagccggagactattccatgcgtgtatggctgaatcctgaaacaatgcgtatccgcaatattactccgcagcaagtttactctgctattcaaagtcagaacatggaggtttcagccggttatgtgggacagcctatcggtagttcggccaataatgattttcaatatacgctgaatgtgaagggacggctttctacttctgaagagtttggggacatcatattgagagtggaagaccaggggaaggtacttcgtctgagagatgttgccaaaattgagttgggaagtgccgagtatggagttgtttccaaattgaagggacaacctacagcaggtattgctgtctatcagttaccggggagtaactcattggatgtgtctaaaggagttcgtgcacgcatggcggaattggctgaaacatttccggcaggggtgaagtataatgtaacattggacactacagatgtggttcatgactctattgatgaagtgatgaagactttcgtggaggcgattgttctagtggtgctggttatcttttttttcctgcaaagctggcgggcagttcttattccatgtcttactatccctgtttctcttatcggaacactggcggtaatggctgctttaggcttttctatcaatacattgacactgttcggcttgatattggctatagctattgtagtggatgatgccattgtggtgactgaaaatgccacccgtattctagatgaagggaagctggacgcccgggcggccaccgagcaggctatgggagagattaccggacctattgtcggagtggtgctggtactgcttgccgtttttatccctactacactgattagtggaatttccgggcagctttataaacagtttgcattgactattgcggcttctacggttataagtggtttcaattcattgacattgactccggctgtttgtgctctgttgctccgtcctactccgatgcataaagcgcgtttgttccgttggtttgatagtatgaatgactggatgcagcgggtttatgacgcttcagtaaaatggttgttggcacgtccggttattgctatcggttcttatatcgtaatatcagtcattgctattctgatgtttgtaaaatggcccagcacctttattcccgaagaagatgacggatattttatgattgccattcagcttccggctgcctcttctttagaacgtacacaaatggtgggtaagcagattgatgctattttgtcagagtatcccgaagtgaagacttatttgggagtaaacggattcagtatcatgggaggtggtcagttgcctaatgcggctacctattttgtggtgctgaagaattggaaagagcgtgcgggtaaggagcataccgctcaagcggtggttaatcgttttaatgaacaggcatatgccatgatacaggaagcccaagtctttggtattattcctcctgctatccctggtatgggtaatacaggtggtttacaactcgaactggaagatcgcaagtctttgggtgcagaagaactgcaaaaggcggttgaggcgttattggctaattatcacaatgagccggctattgcttctataagcagtatgtatcaagcggatgtacctcagtattttttgaatatagaccgtgataaagttcagttaatgggcttgcagttgaatcaggttttctctacattagggtattatatggggcaggcttatgtaaatgattttgtagaattcggccgtatctaccaggtaaaattggaggctggtgaacaggcccaaaaggtgattgatgatgtgttgaaactgagtgtggtcaattcgaaaggagagatggttcctttcagtagttttacacaaatagagcaaaaactgggaatggatcagataaaccgatataatatgtattcggcagcttctatcactattactccggctgcggggagtagttccggtcaggcgatagaggctgtggggagtttgataaaaaatcagctaggaggagagtttggatatgagtggacttctgttgcttatcaagaaactcaggctggtaatactactactattattttaatcatggctttgttggtagcttatttagtattggcagctcagtatgaaagttggacaagcccggtggctgccgtaatgggattaccggtagctattttgggagcgatgctcggttgttgggtgatgggagttccagtcagcatttatacacaaatcggtattattctgttgatagccttatcggcgaaaaatggtattttaattgtggagttcgcccgtgattaccgtaaggccggcaatcctatccgtgaggcggcttatgaggcggggcatgtgcgtttgcgtcctattctgatgacttcatttacttttgtattaggtgtgatgccgttgctgtttgcaacaggcgctggtgccggaagccgtgtggcactaggtgcggcagtagtatttggtatggccgtgaatacgatttttgctaccgtttatattcctaattggtatgaagtgatgcagaatattcaagagaaatggttgacaaagaaacagtgaatgtttccttttcatatttcaccacagattatacaaattaacacagattgaatataaattgctgattgtcaatataaataatctgagttgatatatatagtctgtggtgaatttattatctttgcagcaaacgtataaaatatggatacaataaacaacgatcttactaacttattgcaacagatgggggtgcatcaggaaagtctgggcatcactcagcgtattgtcatgatagcagggattctgatcattgcttttgtggcagattacttttgtagaaaaataatagttcctactataaaaaaactgacagcaagaacacaggctacttgggatgattatttattcaatgatgctgtactggataatatgtgtcatcttattccacctataatattgtatgtattacttccttttgcttttccacatgagcctgtgactttgacattcatactgaagctatgctgggtttacatcacggctgtagccatgaaattgatctgttcttttttgacctctctctataccatttcaagtgaacatgagaagctgaaaaatcatcctctgaaaggagtatatcagatgataaaactgattgtgatttgtgtaggggtaattattatagtcagtacattgatagataaagatcctgtgaacattcttacaggattgggtgcttctgctgctattttgatgttggttttcaaagatacgattatgggattggttgccggagtccagctttctgccaatgatatgcttcgaccgggagattggattactatgccgaaatatggagctgacggtacagtaatagaagtgaccctcaccactgtaaaagtacgcaattgggataatactataaccacagttcctccttatgcattggtcagtgattcgtttcagaactggcgtggtatgcgggaaagtggtggacgtagggtgaagcgttctattaatatagatatgaatacagtccatttctgtacactggagcaaatgaagacatttgaaaaacaagcttggatgtcagactttgaaaaaacgggaaaggaggaagtgaatctttatgtgtttcgtcactatctggaatattatttgcgtcataatcctcgggtgaatacagaattgattttgatggtgcgtcaattacaacctacgccgcaaggattgcccatagaactttatttcttctctgccaataaagactggattccatacgaacgcttgcaagcagaggtctttgaccatttgttggctgtgcttcccgaattcggattaagggtattccaaagcccttcaggattggatgtgttgtctctttcttctcattaatttataatctcactaacggagagatacaggaaatcattacatattaacacggattaaatcaaatttattgattgtcagaatgaataatccatgttaatatgtgagaatgtacactattatacatgaagttccagtataaaccgggtcccttttttataatcagtgtccaaagtcagtgtgccatttaatttataagcgataaggctgcaggtaggcaaccctagtccgttcccttgtgttaaatcgcgtatttttgcaaatggcttgaacagtctttcacgcgcttcaaccggaattcccgttcccgtatcagttagtatgaattgatgtgtatgagcgcttcgttttttgaattccagtgaaatcttaccgcttttcgtatattctgctgcattgttcaataaatggtttaatatgcgttccaattcttctgcatttgtcttaatatttacacgtgggacgtttaccactgcttctactccggacttgaagtttattttcgctttttccataatactttcacataatgtatttatgttcagttcctttagcggataatgttcttcacgtgtttcttccaatgaaatatacgtctggatagctgtcattagttctttcagtgccttgatgttttcatgtaatattggggtagatattgttccctttgttgcttcatctattgtattcagacttggttcaatttgggcgctgatattaccgataaacttagacttctgctcattgttttcattcgctatctgtaggctatgtttcaatttctttacttggcggatatgtttaaataacaaggtagctaaaaataataatccggcagctaatatggcagataacacacataatgcaatgataataattagatttgtggtaatcttgtcttctttttcctgcaaaattttttgactggtttcatatttttgttgtagtgtgtttagctcattggctgtttttactgcttttatggaatcttgccatgaagtataaagttttctcattgcaatagccaatggggcattattattctgttcggcatatcccaacatgtctttatagcattggtctattcctttttcatctttaccggtagagcgcttttggaataagatgttgtaacattccaagcttttgtctgtcataccgaaagtttgataataattggcttccgtcattagaagttcttcttgtaaagagtctgattttaataggtctgtataggagtgaagttgtttcaatagtatcttgcattgttctgtattttttagattcgtatacatacgcaggcgttctttacccaccatgaaacgcaatttgtactcaggtgattttttttcttgctcactataataaatcagtgcgtccatttgtcggcaagtggcaaaggcttctttatattgtctgttttgagtaaagagcgtacttacccgtattccctcttctaccgctttatttatttgcttttgttcggcatactgagtgaattttgcccactttgtatttaactcttgaatattgacacctgccggtatggctgtagtttgtccttgccctgcaacacaacaaaaggcaagtgctaatgttagaagaatttttttcattattgaaacaggttttctgcaaatataacctttttttaagcaaaaagttcgggaagtgcaactttttttcatcttctagcgtctaaactgtaaaacaataacttttaagcaggacaggccatcttgtaaaaagaataaaatcataatatttaaaatgagaaaaatagtaatgatagtcatactggtagccagtatggtacaaggagtttttgcccaacaaataattataaagggcactgtgaaagacgcgacaagtaaaaaggctgcagaatatgttaatgtagttttacaaacagcagattcggtttttgttggaggaactattacgaatagcaaaggcgatttcttactgaataaggtctatgcaggcgattatttattggcattatcctgtgtggggtatcgtacgcaatttattgtattaaacggaattaaacagaatataaatttaagggaaattttattggaagatgatgctgtggctatggaaggtgtaacagttagtgcttccggacaaatcagtcattcggatcgtaagttgatttttccttctgaacggcaaatgaagatttcaacaaatggagtcaatctgttgcaacagatgatgcttccccgtattcagataaatcccatgaataatgagataggagtgttagggggaggagaacttcagcttcgtatcaatggagcgaaagcagaagttgaagagattaaggcattacagccatcagacattattcgtatagagtatcatgacaaccctggtttgcgttatggtaatgctgaggtagtgcttgattatattgtccgtcgtccggaaacggggggaaactttggagtggatttgtctcaggggatgaatgccatgtggggagaatataatgtttttggaaaagtgaaccataagaagtctgagtttggtgtttcgtattacatgggacctcgcgatttctatggtatgtatcgggataatgaagaggaattccatttggcggacggaacaacattacatcgtatagaagaaggtgaaccggggcacggatctgtgtttatgaataatttaagtatgaattataatttacagcagactgaaaattcattgttcagtgctacttttcgtttgagaagtaatagccagcctcattgggattatcaaggagtattgactaatgttgccgattctgatgataaggtggatatgatagaccgtactaaaaaaagttggtctcgtccttcgttggatctttattatcaacagggattgaaaaataagcaacttttggtattcaatgtggtaggtacttataatagggaaaaatcacgccgtttgtatcaagaaagcttgcaggatgagttgttgactgatattaataataatgtattaggagataaatattctctaattggggaggctgtttatgagaagcaattttctaaaggaaattcgttgagtttcgggttgcgccatacccagtctttcgccaataatgcataccgtaacggtcattattatgaaacggatatgaatcaaggggatacatatgtttatggggaatatagaggaaaggtaaataaattggactacagattgggtgtaggtgttactcgttcttattacaaacaaagtggtgatgattcgtatgagaattatagttttaatcctcgtttggtactgcattatacgttgccgggaaattcattcgtccgttggaaatccgatatcagtaatgcttctccgtcattgggggatttaagtgcagtagaacagattgtggattcgttgcaaatcagacgaggcaatccgaacttgaaagcctatttgcgttatcacacagagttgacatacgaatggcagaaaggtatattttattctaatctttggggggcgtatgattatcagccgaatgccattatggacgagaagtatcaggacggtgacaagattgtacagacatgggacaatcaaaaggattggcagaaattatcagggcgtctgactttgcgtgttggccctattaaggatatgctacagttctcgtttaccggtggagtaaaccattatatccttaattccgcaacactattacaaatataactttttaagtacctgagcaacaaaaagttgctcaggaatttgccatgtcagatttttcacctatcttagtgttgcaaatcaaaatatgtatcaaacccgacagacatggcaaaggtagcaattaaatccgagaaactcactccttttggaggaatattttcaataatggagcaatttgactccagactctcatctgtaatcgactcaaccctcggtatgagatgcaggctgtatggttatcaatacagcgaaatcatccgttcgcttatgagcgtttatttttgtggcggctcatgcatcgaggatgtcaccactcatctgatgtaccacctttcgcttcatccgacacttcgcacatgcagtgccgacacgattcttagagccataaaggaactgacccaggataacatttcctacacatccgacactggcaagacctacgacttcaacacggcagacaagctgaatacactgctcctcaattgcctattgtccacagggcagctgaaagagggcgaggggtatgacgttgacttcgaccaccagttcatagaggctgagaagtttgatgcgaagcctacatacaagaagttccttggttatcgccctggcgtggcggttattggcaacttgattgtcggcattgagaacagcgacggcaacacaaatgtccgtttccaccagaaggacacgctgaagaggttctttgaaaggtttgaacaaaacaagcttattatcaaccgtttcagagctgattgcggctcgtgttctgaagagatagtggaagagattgctaaacactgcaagaccttctatatccgtgctaaccgatgcagttcgctctacaatgacatctttgccctcagaggttggaagaaagtggaattgggcggcattgagtttgagctggcctccattctcatcgagaaatggaaagggaaggcataccgtcttgtgattcaaagacagaagcggatagacggcgaactcgacctgtgggaaggagaatacacctaccgctgcatccttacaaatgactacgagtcttccgagaaagagattgtcgaattctataacctccgtggagggaaggaacgcatcttcgatgatatgaataacggattcggctggaacaggcttccaaaatcctttatgggagaaaacacggtgtttcttctgcttatggcactcatacgcaacttctataaattcatcatggcgaggcttgacgtgaagaggttcggactcaaagcaacaagccgcatcaagacgtttgtctttaagttcatctctgtgccagccaaatgggtcaggacatcaaggaagtatgtgctgaatatctattcatgcaacaatgcttatgccaatgtgttccagaatgactttggataacaccgacaacttatagtcgtgattttgcgtattgcctcaagtcgcatggtggggtaaggggcatttatatgtctttatggtgacattcgatgcactgtgccccctttttactaacgatgcagattcttttcgcttctgtatcatattaggcgcgtagttgcggatttgaggtatatgagtcatggtaatacatattctcatacttatacaaactggtattgtaatgctgaagcatcctttaattacaagcagttctctctttactggcagatgaatactaattggaataatttctggggggaaaccttgtcagggggggagaatattcaggtattggtgatgtattacacgcacaagaatttgcgtgtagggttgggagcttttaatccgtttacggataattataaacagcagactgagaactggaataaatatgcttcttataaaaaaacgaattatgtgaaggagagctcgcaaatgtttttggcaagtgtttcttataatttctcgtttggccgtaagtttaaagcaggccaacggagggtgaataatagtgataacgattccggagtgatgagtaccggaaaataaacaagataatcattttaatgaacttaagttcatggggcaagtaagttaagtaacttggctcacgaacataagttgcttggcttacgaagttaagttcataaatttatcgaaataatagatatattacccttaacaaaatcatatatgaaaatgaaaaaaaacttgattgattatgagctcctgtgggagaaaattacggattacgtaaaggccaccagtagaacgactgctcgtcctgtacttctattatattatgtattgcgaagccccgaaactccctcttcggataaaatgttgattgtggcggcactttcgtatttggtattgccgattgatttgatttcggctaagcggttaccaattatcggctggattgatgaagcggtatctttggtttatgcttataaaaaggtgtgccgctatgtgactcctgagattgaatcagaagtggataatgtactggaacgctggtttccggaaggaaagtacgaattgatagaagaataaatattgtacttatctttggggagtaaggatgggtaaatggagtattttaggaatgggcttcgtcgactttcggcgtggcccttgctgattgtagacaaaggtagattgtaattctaccccaaggaacttcattttgtttcatatattatgcatctatgatttttaactggtacggaaagaattatagaaactgtctgttcttacgttccggatggaaataaagcaatatatttggaatgaaatcattttgtctgagaatatgtgatgtatgtaaaagtgttacaatatgttttgagtattgtcaataccttatagttcaatgtttaacatgacctaagttctcttagaactttatacctaagttcaagcggataatgcaacaggagtgagaatgatgacaatgagaagatacgaaaagaataatttttcagaggaacagagaaagaagatttctttcccttttgttcccctgtggaaaagttgtttctttgcatcttccagttccccaacattcagttgcaatatgaaacagctaaccgaagaacaaaggtataacatttccgcttatctgcaaagcggaaagtcaagaaccgagattgccaatcttgtaggagttcatcgtagcactataagtcgtgaattacgtcgtaatagtgataaacgtaatggcatttacaaaccggatctcgctcaggctaagtatatgtccagaatgcgttcacgaaagcacttcgtgaagtttacggacgacttgaaaattcaagtagatatactcataaagaaagatttcagtccagaacaagtgactgggtttatgcgaacaaagggcttggaaacagtttctcatgagacaatctaccagtatatttgggaagataaaaagcatggagataagttgttatacaagcatttaagaagacggggaagaagtcataagaagagaggtgcattgactaatggacgtggttttatcaaaaaccgcgtggacatagacaagcgtcctacgatagtagacaagaaagtacgttttggtgatttggaaattgacacagtcattggaatgaatcacaaaggagcactattaactataaacgacagggtaactggactagtatggataagactacttagcgggaaagatgccagcccgctaactaaagctgccatcgatgccttggaaccttttagagaccaaatacatacaataacggcagataatggaaaagaatttagttttcacgaagaaattgcacgtaaactaaatatttttgtttactttgcaaaaccataccactcgtgggaaagaggagccaatgaaaacagcaatggtttgattaggcaatacttcccgaagggtacggactttagggacataaccaatgaacaggtaatgcgcgttcaaaacatcttaaactcaagaccgagaaaaagattgggttacatgaccccaaaggaaaaatataaattattaactaacaatgaattcgacactgttgcattgtctgtttgaattcaggatattaaatattgctgcaaagatatgaaaatatattaaataccaaagatatcgcagctaaaatgttggataataaataattttattctaacaggatttactttttgcttgccaaactcagcaaaacaactctttttgaacgtttttatctaagttctaagagaacttagcatttatgaacgttaaattaaaaagtttttttatgaaaaagagagttttgtttacgttgacttgtctattcctatggacaggtatggcaatggctcaggtatcccgaattactggagttgtagtttcggcagaagacaatgagccgattgtcggagcttcggttcttgtgaaaggtactacccttggaactattaccgatatgaatggccggtatagtataaacaatgttccggtcaatgcaaaatctttggtaatatcgtttgtcggtatgaaaacacaagaattggctataaagggtggtgagcaaagagtagtgatgcaaagtgatacagaattgattgatgaggtcgttgtagtagcttatggtacacagaaaaaatcatcttttaccggagctgcttccacagtaggggccaaatccatagagaaacgtgctatcactaatgttacagctgcattggaagggaatgcttccggagttcaggtgactgctgccaccggacaacctggtgaatcttcttctatccgtattcgtgggtttggctcagtcaatgcatccaatgctcctttatatgtagtggacggaactatatataatggtagcataggtgatattaatcctgcagatattgagtctatgactatattgaaagatgcggcatctacttctttgtatggttcaagtgcgggtaatggtgttatcttgattactactaaaaaaggtaaagagtcaggtggaacaggagtaaacttgactattaaccaaggatggtcaaacagggcttataaagattataaaaaggtgggaatttatgattactatcctttacaatgggagatgttgaagaattcctatattacatctggtaaagatgtcgcaacggcggcctcattggcaacatctaaaattggaagtacgttgaaatataatccttttgttggtgtcgcagatgatgccattgtcggaactgatggaaagctgaattcttcagccgatgcattgaagtggggagatgatttggattgggaagatgcagctttcaagaccggctatcgtcaggaatataatttgagttataatacaaaaacagaaaaaagtgatacttatgcttctgttggttatttaaatgacgatggttatatgattaagactgactttgaacgttattctggtcgtttgaattataatgtgtaccctactaaatggttcaagactggtttgaatttgggagtaactcgtacggtatccaattattcaacttcagattcgggaaattcgagttcatatagtaaccttacacgttttattcgtaccatggctcctatatatcccgttcataaacatgatttggaaaccggtgcttatttggatgctaatggtaaggcaactactgatccgggtgaatatatttatgattatgaaggaactcgcttgtcgaataatggacgtgatgcgatagctgaaacagagttcaatcaacgtgaactagtgcgtgttaatcagactggacatacttatctcactttgactccggttgaagggttgaaccttacagccaattactctatcaataatattgattatcgtcgtaaagtctatgaaaatccttatgtgggcgatggtactgcaggaccgggccgtttgaaccagatgtctacccggacgctgactcagacctttaatcaattgataacttataacaagtctatcggaaatcataactttgacgttcttttaggacatgaaaactattcttataagtatgagtatttatatggtatgaagactcaggaaacagtttcgggtatgtatgaatttggtaatttcgtaaatatcagttcacttagctcctatacaaatacctataaaaaggaaggttactttggccgtatcaattatgattatgctcataaatactacgcttcactttcttatcgccatgatggttcctcgcgttttgcaaaagagaaccgttggggggatttctggtcgttcggagcaggctggagaattagtgaagaggcatttatgaaggatgtgaaatgggtgaataacttgaaattacgtgcttcttacggtgaaacaggtaatgataatatattggatagtgatggtgatcctgattattatccttatcagaccttatatggtttgggatataaaaatggttcagaagctggagcctacttcacggtgatagccaatccctcattgaaatgggaaacacaaatatctacggatattgctcttgaatttggtttgtttgactgtttgacgggtactattgaatattttaagaaagattccaaggatttgttgtttgatgtttctcagcccgcttctgtcggagtaacatccattatacagaatattggtaaggtcactaattcaggagtggaaatagagttggattataatgcatttaaaaataaagactggagtgtatctgttggggctaatgctacttttgtgaagaataagataaagaacctgccggctacaatgaaagaaaatggatatatcagtggttctaaaaagtggttggaaggaaagtccatttatgaattctggctttgtcaatggcatggggtagaccctcagaccggtgatggtttatatgtggctgatgtaagtaaatataatcaagggaatattggaacaggggatggaaacattacacagagccagtttgatgagtataaaaaaacagtagtgactattgatggtaaggaattgaccaattcgtatacttatgctaaatacgacttcagtggttcttctattcctgatgtgtttggtgggtttaatgtcagagtaagttataagaactttgatttggctgctgtattctcttaccagttgggcggtcaggttttggatactaattatgctaccatgatgagtatgactgaatttggttatgcacaaagtccggatttgttaaaagcatggaaacaggcaggggatattactgaggttccccgcatagacaatagtgcagctcataccacgaatattggtcagtcttattcaactcgttggcttaccagttcggattatcttaatttaagatctgtcactattggctatcagttcccaaaagcttggttgagcaaagtgatgcttaagagcgcccgtttgaatctgactgcggaaaacctgttcatgttgaaagcccgtcagggattgaatccgatggctaattattccggtgtaacttataatgaatatatgccgtcccgtaatatcacgttagggcttaatgtttcattctaaaaaataaaagaattatgagatcaattaaaaatataacattaggattagcgacagttggagtaatgttcctatctggttgtgccggtgattatctggatactattccctctacctctgtttcagaaacgacaataaacacctcgttggacaatctttatatagcattgaatggaattcataaagagatggtttctcaggaaagtggatatcagtgtttgggcggtgaacccggttttatgatgtcacgtgatgcagaggctgatgatatgaattggcagacaaatacatggatgaaggcggcctatttaggatggcaatgcaatatgaatgaaacgaatggttataattataagttctggcaaatttattatcaatggattctgaatgctaacaaaattttggcgggtttggaggaagttgaaataactagccaggaattgtttgaccagataaagggagaagctttgtgtatccgtgcttgggctcattttaatttggtacagctttatgcaaaacgttatgaagccagcaaggataatacacaggatggaattccttatcgtgaaaaagctgtggccgaagagcaggcacgtaattccgtagaagatgtttatgctaaaatcaataatgatttggatgaggcttgtatacttttgagtggaataaaagtaaatgatgtcaatcattatagcgagatggtggcatggggattgaaggcacgtgtagcattgaccatgcaagattataataatgcggcggtttatgcagggaagtctatttctttagctgaagcaggtggtcaccagttgatgactggcagtcagttgaattgtgggtttgccaatattacgacggacactaaagaagcgatgtatgctgcaatgactcccgatgataagactgtttatttttattcttattatgcatatatgtcatggaactttaactccagtgccattcgtcagggagtgaagtgcataaatgtggatgcttatgaaacgatgtctgaaacagacttacggcgtgcgtggtgggatccgactggggaagcatctgttccgtcatcaagttatgcaaagaatgcttatcaaaaccgtaagtttactgcccgttctacagccgatgctgtaggtgatgtcgcatttatgcgtttggcagaaatgtatctcacccaggctgaagctttagctcgtgcaggaaaagatagtgaggcgcagactgtgtttactaaattccagataacccgcgatccctcttatgtctcgaaaggtaatactggtgatgctttggcagaggaaattatgaatagtcgccgggtggaattatggggtgaaggttttcgtttttatgatttgaaacgtttgcatttgtctattaaacgtggatcaaattttgatatagctttctgtactttccttgaaaaggataaagatgcacaaggttgggtgtgggagatacctaaaattgaaacagactttaattcactttgtacgaagaactattaataattctctctaacacataaattttctcttaaaggaggtgggcagactttttcttgaaagttttgtaccacctttttgcttaacataacctttgttttacaaggccgatagcttttctggttttctttttgtgttacttgtgttgtctaatatcaattttgttgatgtttttttagtaatttagaagaaatggatttaatttatacttgttctaattgctataatccattgttttgaatgaagtaaagaacctgtaaacacaaaataagtgtaaacagattctttactattgtttaaaatgataaactatttaggtgaaaaagtttattcctcttcgtccagtaaaatgttcataatctgaacagctgctttggcaacagaagttccggggccgaagattgctacaacacctgccttgtataagaagtcatagtcttgagcggggataacaccaccagcgataactaaaatatcttcacgacctaatttctttaattcttcaataatctgcgggatcagtgtcttatgtccggcagccaatgaagaaacacctactacatgaacgtcgttttccactgcgtcacgagcagcttcggcaggagtttggaacaacggtcccatatctacgtcgaaaccacagtcggcataacctgttgcaactacttttgcaccacggtcgtgtccgtcctgtcccatcttggcaatcatgatacgcggacggcggccttccttctttgcaaattcttcggtcagttcgcaagcttttgcgaagtctgtatcctttttactttctgatgagtacacgcctgatatagttctgattactgctttataacgtcctacaattgtttcacaagcatccgaaatctcgcccaaggtagcacggacatgagccgcctctacagccagttccagcaaattgcctttacctgtctttacacattcggtgatggctgccaaagctttgtctacttctgcttgattgcggccttctttcaaacgcttcagattttcaatttgttccaaacgcacagctgtattgtctacttcaaggatatcgataggatcctctttttccaaacgatatctgttggtgccgacaattgtctgggcaccggagtcgatacgggcctgagtacgtgccgcagcttcttcaatacgcattttgggtactccggtttcgatagctttcgccataccgcccaagctttcaatttcctgaatatgttcccaagccttgtgagccaattcgttagttaaagattctacatagtaagaaccaccccatgggtcaacgttcttgcaaacatatgtttcttcctgaatataaatctgagtattacgtgcgatacgtgcagagaagtcggtgggcaatgcaattgcttcatccaacgcgttggtgtgcagtgactgggtgtgtcccaatgctgctgccatagcttcaatacaagtacgacctacattgttgaatggatcttgctctgtcaatgaccagcccgaagtctgggaatgggtacgcaatgccagtgatttcggattcttcgggttgaactgtttgacaattttggcccacaacatacgtgctgcgcgcattttggcaatttccataaaatgattcatgccgatagcccagaagaatgacagacgtggagcgaatgcgtcgatgtctatacctgcagcgactccggcccgaagatattccaaaccgtcagccagtgtataagccaattcaatatctgctgtggcacctgcttcctgcatgtggtagcccgagatggagatagaattgaacttaggcattttttgtgaggtatattcaaatatgtcagagatgatcttcatggaaaaggcaggtggataaatatatgtgttacgcaccataaactcttttaagatatcattctggatggttccggccatttcttccaatttagctccctgttccaaacctgcattgatgtagaatgccatgatgggaagtacggcaccgttcatggtcatggaaacagacatcttattcaaaggaataccatcgaacaaaactttcatattttccaatgagcaaatagacacacctgccttacctacgtcacctactacacgttcatggtcggggtcatagccgcggtgtgtcggaaggtcgaatgcgacagacaagcctttctgacctgatgccaaattacggcgatagaatgcgttgctttcttcggcagtggagaaacctgcgtactggcggatagtccaaggacggaaagtgtacatcatggagtacgggccgcgaagataaggaggaatacctgctacatagttcaagtgctccatgccttccaaatcttctttagtgtaaacaggcttcacattaatgtgttccggcgttttccagtcggcggtgatgccgttttctttttgccactccataccattctgaggttggaatccggcatatatatctatatttttaaaattcggtttcattgttcttccttacttaattcctaacttagcgttgtattctttcaatgtgtccaatacgttaacacgtacatggataaagttttcgatgcctgcggctttcagctcttccatacaagcaggagcacctgcaacaatgaagatggctcttccatctaatgccttgaatgcaggaatagcatattctgcgtattcatcatcgctggaacagataactacgatgtctgcaccggctttcatagctgcttcgacaccggcctctactgtggggaagcccaaattgtcgattacttcgtaaccggcacaagccaagaagttgcatgagaattgggcacgtgcttggcgcatggccagattaccgatagttagcataaatgctttcgggcgtttgccggatttctctgtctgcaaacgaagtgcttcaaactggctggcagcacggtcgaagtttaatgtggcaaacggtttttcacagttgtcatgattgcctccacaacaacatttggcttctacaggagccttttcgcctgctttttcattgaagttaggatattggttggtacccagtaaaatttctttgcgttttgaaacggagtcgtggcgggccttgttgcttgcgttgatcgcttcctgtacttttcctgctttgactgcttccagcattcctccttcgtcttccactttcaagaataactcccatgcctgtgtggcaatagaaattgttaaattttcaataaagtaagaacccgcggcggggtcaactactttgttgaaatgacattcttcttttagcaataactgttggttacgggcgatacgttcagagaagtcgtccggagtttcgtaagtcttgtcaaacggggttacagtgatggagttgactcctgccaaggcggcactcatcgcttcggtttgagtgcggagcaggtttacatgtgcgtcaaacaaagtcaggttgaaagtggatgtttcagcatgtgccaccattttgcaggcacagaaacaagtgccgtcttccgctttgttcggacattcgggttggcagttgcattgaggatgatattcttttacgatgtccgcccataacatacgtgctgcgcggaacttggcaatttccagaaaatagttggaactgatgccgaaattgaattttattttcttggcaaccagtgcagcaggaactcctgcttctaccagtttgctcagatattcgttaccccaagccaatgcatatcccagttcttgtgaaatataagatccggcattgttcagttctatcgcattgacacagatacaacggaatttaggtagcggagccagtacttctaccaattctttggcggtagtgatgaaattgctaaggtctttgccttttaccatcattttacccatagggtcatagttgacggagccttgcaatttggtcaggtcgtattctttcttttggaagtaagcaaccaacaatttggctaattccaccgtatgtccttgacaagtggagaagtttaactcaatgcattccgcacagatatcattcaataatgtttcgatatattcaggactgagatctttcttctttacgtagaatcccaatgagtcaacacctttgttcaaaatatccagtgctttagcattggcttctttaggacactctactttgatttcctgacgcacgaaccaagtattgtcgtttttcttcgtgcctcttacataggggaattctccgggtagtccttcggttgttttcaaaccttccagatcttcctggcgataaaatggttttactttaaaaccttcgttggttctccaaaccaatttcttttcaaaatcagcgcctttcaagtctgctgtaatcttttccatccactgttccgtagaaacggctgggaagtccgaaaagagtttctctttactatctgccatagtttattcggtattaatatttaagaattatatcacatactttttcaatagtatgggcaaatatactaaaaccttttaaatagaatcctttttttagctattttcataaaggagaaagagaggtttctgtcattttgttaactgacgaaagcaaaagatgttcttattgcaaagtggatattgcaaaataaataagaatcatgaaataatagttttcaaattgttgggttgagtgaggggaattcattaattttgcggcaattttataaaaacatagtattatatcatggactggttacaaaatctattatttgatgaaaactcaatagcgcatatcgtgctgctttattcttttgtgattgcagtaggagtgttgctgggaaaaattaaatttttcggagtatcgttaggtgttacttttgttttgtttaccggtattgtctgcggacatttcggtttaacggggaatacacagatacttacatttttacaggatttcggactaatattgttcgtgttctgtatcggacttcaggtaggtccttcttttttctcttccttcaagaaaggagggattgcaatgaatctagtagcaatggggattgtcgcattgaatattgctgtggctgtggctttgtattatggcttgaacggccggatagagctgcctatgatggtgggtattctttgtggtgcagtaacgaacacgccgggactgggtgctgccaacgaagcgttgagccagctgaattacaatggcccgcagatagcgatgggatatgcgtgcgcttatccattgggagtgctgggtatcattggttctattattgctatccgctacatttgccagattaatttgaaaaaggaggaagaggatatcgctaaagaagaagctgcaaatcctcatctgactcctcgtatgatgcacctggaagttcataatgaggcattggcaggaaaaacgttgcttcaggtcagagacttcatggggcgtgattttgtttgttcacgtattttgcagaacggtcatgtcagtattcctaatcgtgatactgttttccatcttggtgatcagttgtttgtggtttgtgcagaggatgatgcggaagccattattgcttttatcggtcctaaaattgaagtggattgggaaaagcaggatactccgatggtatcccgccgtattttgattacacaacctaaaatgaatggtaagcaattgggggaatttcatttcagtagtatgtatggtgtgaatgtgactcgtgtcaaccgttcaggtatggatatcttcgcttcacgtaacttaaccttgcaggtaggtgaccgtgtaatggtggtaggtcctcaggatgcggtggaacgtgttgccaatttgatgggtaactcattgaaacgtttggatcatcctaatatcgtgactatttttgtgggtatcttcttggggattttctttggtagtctgcctattgcatttccaggtattcctactccggtaaaattgggtttggccggtggtccgttgattgtatctattttgataggtcgtttcggatataaattgaaattggtgacttataccactatgagtgccaatttgatgttgcgtgaaattggtattgctttgttccttgccagtgtggggataaaggctggtgcgaattttgtgaatacggttgtcgatggagatggtctgttgtatgtgggttgtggtttcctcattacagttatacctttattaataatgggagcggttgcacgctggcattacaagatgaattatttcatgttgatggggcttattgcaggtagtaacacagatccccccgcattggcgtattctaatcagacagcaggtaataatgctccggcggtaggttattctactgtgtatccggtatccatgttccttcgtattctgactgcccaattattgatattaatattggcaagttgatattggcaaaaagtataaaaacaataaagtataacttgtaggagggggtgtcaaaaaatggtagcttgaatcattttttggcgcaccctcttgctgattaaaagaataaatatgatttcagtagatggattgaccgttgagtttggcggtaccaccttgtttagtgacatatcttttcggataaatgagaaagaccgtattgccttgatggggaaaaatggtgcgggtaagtctaccttattaaagattttggctggtgtacggcaacctagtcgtggaaaggtgtcggctcctaaggattgtgtgatagcttatcttccccagcatctgatgacagaggatgggcgtactgtattcgaggaagcttctcaggcattctcgcatcttcatgttatggaggcagaaatagaagccataaataaggaacttgaaacgcgtaccgattatgaaagtgattcatatatggagttaatcgagaaagtttctgccatgagtgagaagttttattccattgatcttacccattttgaagaagatgtggaaaaggctttgctgggacttggttttatgcgtgaggacttcaatcgccctaccagtgatttcagtggtggctggcgtatgcgtattgagttggctaaattattgctccagaatccagatgtattattgctggatgagcccactaaccatcttgatattgaatccatccagtggttggaagatttcttggtcaatagtgccaaagcggtaattgtcatcagccacgaccgtaaatttgtagataatatcacaacccgtaccattgaagtgacgatggggcgcatctatgattataaagtgaactattcccaatatctgatattgcgtaaagaacgacgcgagcaacagatgaagcaatatgaggaacagcagaagatgatacaggaaaccaaggatttcatagaacggttcaaaggaacttatagtaaaactttgcaagtgcagagccgtgtgaagatgcttgagaaattagaattggttgaagtggacgaagaagatacctcagcattgcggttgaaattcccgccttctccacgaagtggaaattacccggtcattatggacagggtgggaaagacctatggtgaccatgtagttttcaaggatgcctcattgaccatcgagagaggggataaagtggcttttgtgggcaagaatggtgaaggtaagtctactttggtaaagtgtatcatgcgtgagatagagcatgaagggactttaacgctgggacacaatgtgcagattggttattttgctcagaatcaagcctctttattggacgagaacctcacggtttttcaaacgatagatgatgtggcgaaaggggagatccgtaataaaatacgagacttgttgggtgcatttatgtttggcggccccgaagcttccatgaagaaggtgaaagtgctcagtggtggagaacgtactcgtcttgccatgatcaaactattgttggaaccggtgaatctgttgattttagatgagcctactaatcacttggatatgaaaaccaaagatatcctgaaacaagctttggtggactttgacggcacattgattgttgtgtctcatgaccgtgactttttggacggattagtgacgaaagtgtatgaatttgggaataaaaaggtaaaagaacatctctgtggtatctatgagttcctggaaacaaagaaaatggaaagtttgcaggagttggaaaaataaattagctttgcatctgttaactttggattggaggtggagatgcaaacaatttctatagatataaataaagtacaaaaaggagacgaggcggagtttcgtcttctttttaatcttttctatcctcgtctgatgtctgtagcttgccgttttgtgcctgaacatattgctgaagatattgtacaaagtgtttttgtcatgtattgggaacagaagtctaccttgacacctaatgccattcattctttcctctataaatgtacacagaataattgcctgaattatctgaagcaccaagctgttgtgctggggcatgaggaggaggtgcgtttggcggaagaacgcatggcctttcagctggcaggatcggatgccaatgaattgtggaatgaggtggttgagcgtgacatccggaaattgttggaagcttccatctctaaattacctcctaaatgtcgtcaggctttcgaattatcttattttaaagagatgacttataaagagatagcggaggctatgcatatttcatcccgtacggtggaagaacatgtacagaaagccacaaaattcttgagagaggatttgaaggaggtattgttctgcctgttgtttttgcttcgttaatactttcatgcaggctttttctggagtctgtaaaaaataaaatgcaaaaaaaagcattttttcttctttttaaccccgtagttctttcttggttaattgtcttaataatgaaagacaataaagaaagtaaatgaaggacgatattttaattcgatatattaataagcattgtactgcaaccgaagaaaaagaggttttagagtggttgaaggagaaagatagccgtcagcgtttatttgagctggagcaaatctggggtctgaaaactgaaatgcgtttttcggataaaggacgtatggatgaagcttatcggcaactgagcggacagcttggcttgagtaagcaggcagagaaaagagagaaaccggtacagagattcaccatcggggaatggtggaagtatgcggctgtgttggttactgtttgtctttttgcaacaaacttgttttatatcacgaaagaggaaccggaagcatacaatacggtagtggttccgaaaggccaacgggtttctttattgctgagtgatgggacaacagtttggctgaacgctgagagccgtttttcttatccggctaagttttcggaaaaatatagaacggtcacattggaaggagagggctattttgaggtggcacataatccaaaatgtccgtttacggtgaaattgccgatgttgaatatcagggtgttgggtacaaaatttaatgcaaaagcctacttggatgaaccgagttggattactttgaaagaaggttcggtagaagtgtcaaccttagatgacagaagtaaggaaaggatgtcgcccaatgaccaggtatattacaccgttagtgacggcttggtgttaataaggagttcggcgcagacaaatgtggatagttggactactggtgacctgagattcgacaacaagaccttgaaagaaatggcaaaggttatagaacgtcggtatgatgtgaaaatcaggattatggatagttcgctggttgaagaatatttcacttgccattttaggaaagacttgaccatagcccaggcgatggaattgctgaaagaaaccagacgggtggattatagaattgaaaagaaaacggtatacctatataaaaaataacagtatgtgaaactttgaaaaacaacggatgcctatgaagtaaaacccttgcaaaaaaatgaagggtcgaagacgcaccaccatctttcgacccggattaatgagtaaccttataatttattacaaactaatcaattacaaatgtatggataatattatgaaatgcacaccattgggtgagcaaaaatcactatggctacgaaaaacattgttaattatgaaattctttgttctttttctattattgggaactatcccgtgttgggcaggtgtcgcttattcacagaatgtgaagatgtctttggatatggaaaatactacggtgcatgatgtgattaatgctattgagaaaaaaggggaattctattttacctataatctgaatcaaatcaatgtcaatagaaaagtatccattaaagtagaaaataaaacgataaaccagattttagatcagttgttttcgaaatcaggtatcgattataaaatagaaaatcgtcatattgtattatataagcaggcggcttccgaagtagaagctgtgaaacaacagaaatctataaatggtattgtagccgatgagcagggtgaacctatcattggtgccagtgtattggaaaaaggtactacaaacggtacgattactgatttggatggtcgttttactttatctatcggcaagggaactgaattgattgtttcttatgtaggttataccacaaagaccgtgaaaataggtaatcagtctactataaaaatcgtattaatagaagataccaagactttggatgaggtggttgtaattggttatggtacacagaaaaagtctgatgtttcaggttcggtaacatcagtatcgggtgataaattgtctaagattcctactgcaaatgcagagatggcattgcaaggtatggctccaggtttgtcggtaaactttggcagcggtgctgctggttcttctgccactttgcaggtgcgcggtgtgacttcttggaaagatgatgatggcgagaacagcgaaagtaacggtccactggtgattatcgatggtgtcccgggtaatatgtcttatcttaatcctgaagatattaaatcgatttccgtattgaaagatgctgctactgccgctatctatggctcacgttcggcagctggtgttattttgattgaaacacatcgtggtacgatgaattcagctccgaagattactttttccggttattggggattgagtgccgtgccgaagcgtctggaagtttgtaattcagctgagtttattaaagtacgtaagatggcattaataaatgcaggtacggacgagagccgctggcctaaatatatcagcgagtacgagagagacccgagccagtttgctgatactgattggcagaaagagtattaccaacgtggttttacacaaaaatataacatcggttacacggcaggtagtgctaattccaatgtgtctctttctgctttctatagtaagacggacggtgtgactattgctaccggagatgaaaagttcggtttccgtttgaactctgatgttacccgtggtaagtttaaaatgggtgaatcggtaagttatagtcgttggtcggccgatttggaatccaattcgggtttctcctccatttatcaggtgacgaatatggagccgttagcgttcctttatgatgagaacaatgatggcggttatggtggtgccatctctggtatgggcatgtctgacgccggtaatcaggttgctttcaataaattgattgataatacaagctctaacgattatatcgcagcttccggttatttgcagtacgagccgattaaagggcttatcgtgaaattcaatgctagccgcaatatgtactttggcaaatctcgtcttttcaaacctacctacgagattggagcggccaaacggaatacgatggctagtttgtctgaatcacgttcgcagactaccaacgatttgttggaattgacagctaattatgacaagaccattgctgaaaaacacaatctttctcttttattgggactttctcaggaagaaaataagtatgaagatcttagtgcttccggttctgattttgagaataatagtatgagcttgatgggacatgctaaaagtaactattctgtaggtggtactaagactcgcagtgctctccgctctctctttggccgtgtgaactacaactatatgatgcgctatatgattatggcttctttccgttatgatggctcttcacgctttgcgaaaggcaacaagtggggtttcttcccttctgtatcattgggttggaacattgctaatgaaccattttgggaaaatttgaaagaaactgtttccatgttcaaatttcgtttaagttacggtgctttaggtaatcagaacataggtctttatcgatatattcctactttgagctataataatcatgcattgaactatccttttgatggtcgtgaaacttctatgggatatgccatcactgcttttccatccagcgatatcaagtgggaaacgacggtgtataagaatatcggtgtagacattagtttatggaacaataaactggagctttctgcggaggcttatattaagaataccagtgatatgctgtctagccgtaacatcagtttggctaccggttataattcttctatcttggtgaacgatggtaagttgcgcacaaccggttttgaaatgcaagctatttatcatggcaaagccggaggtttgaagtacgatttggatttgaatttatctcactataagagtgtgttgaaatctatggccaatcctgattatctctatgagtacggtgctctgcgtacttatgtaggtggtgaaataggtgaattctgggtatatcaaactgccggaattttccaaaatcaagcggaagtggacgaatggaacacagctcatggctataaggaccaaaacggcaactggcagcctctgcaacctgtggctaaaccgggtgatatccgtttcatagatcagaatggagatggtatgcttgatacaaacgaccgcgtgaaagtgggtagtggtacaccgaaggtgtcattgggattcaacattaacttggcttataaagactttgacttggtagccaatttctacggtgactttggtgctaagcgttataactatactaaatatcagttggagcgtatggaccatgtgttcaactatggtaagaatgccttgaatgcttggacacctgaaaatcctgatactgatattccacgtgccgtgtctggtgatcctaataagaactctcgtacttctactcgttttgtagagaatggtgactatctgcgtctgaataatttgcagataggttataatctgccggttaaatattgtaagaaaatgggcttgagtaacttgcgtatttatgtaggcgctacccgtttgttcactattaccaactacaaaggctatgatccttcaaccggttcttcagtcggacagatgggatatgactatgcagccattcctttgagtcgtgactttatgatgggtcttaaattcggtttctaattaaatttaatacgaagattatgaaattcaaaaacatattattatatgcagctcttctgagcggaatgtctttttcctcttgcactgatttcttggatgaagactctaatcccaatgctttatcacctagtattttctggaagagtgaaggggatattatgaaaggattgactagtgtatacggagctttgcagccgaatgcatcttgggcgataccgtttgaacgctacatagtaatagacggatacagaagtgatgagattacccacagggatgatgtgacgagttggatgaatatttcatcattcaatgtggaacccactaactccgtagtcaagacggagtggactaatttgtataaaggtattaactatgccaatcaatgtttgaccaacattcccactgtacctggtgactcggaatcactcaatgccttgaagaagcagtccatagccgaagctcgttttttgcgtgcttacttttattatcgtttgtatgtgaactttggtgagagagttcctatttataaggaggcattggtaggtacggatgaagagttctatccgccacaggccaatccgggagaattggtaagtctgattgagaccgaactgaaagaagtacagagcgaccttcccgaaagttatgaggaaagtgaaaaaggacgtgtcacgcgttatacggcagcggctcttttgggtaagttctatatgttccgcaaagaattgagtaaagccgaagttgaattcaagaagatcattgataaagaaggaagtctttttggcttgatggagaattgggctgataattttgacggtatgcacaagaacaataaagagtctctttttgagatccagtttaccggagaccgttcaggcggacagtatgaatataacttgtttactgttcatttgggacctatggctggactggatgcatatgaagaagcttatcctacggactggatgtgtcagacgttattggctgataagactatagacggtaagtctagcgaccgtgcacttcatacgcttatttttgacgatcccgagtgtcgtcccttttattatgagaatggaaaatcctttaaggattaccacaaagaaggagaaatcttctggcacaaatatgttacttataccgagggtatgagtgattattgggactatagtttctttaatgtttccgttatccgttatgccgatgtattgctgctttatgcagaatgtctaaatgacaagggtgaaacaacagaggccattaacataataaataaggttcgtgcacgtgtcaatgtaccggcattgccgcttaccatgggtaaagccgaagtcttgaaacatctgcaagacaaagaacgtccttgcgagttggcattggaaggttcacgctggtatgacttggttcgctggggtattgtagaagaaacgctgaaagctcacaataaaccatttgttgagaattatgtagataccaagcaccagttgtttcctattcctcatagtgaatttctgttgaatcctgattgggagcagaatccgaactatagcaagtaatcttgtttgtataattttggaagaaccgtttatgaaacatttatttcctatatatggaatgtgtagcattctttggctgggggcatgtaccccggtcgctacacagccagaaaagtccctgtttatgacacaggaagattttcccaatttgttgaatgtgaaaaatgtaccggaacaatctgtagatggggatctcaatttgttctctgatctgggtgcatggagtggctatgcgttgccagtaaatcaaagcagggcatttgcgggtgccttcatcggccctatgacgatgcatggaagaggatggattgcccaaacgttggcacagcctacgttggtggtcaatggtgaaaagtacgacttggttcgcaatatgcagactgccaagtatctacccggaaagttgatacaacattttaaagatgcgcagttggaattcactactgagttgtgttttgctacttcacgcactgcttttgtacgttctgttattacgaatcttagtgacacacctttgaatgtgtcgctgacttggagtggcggtgttttcgaagagaatactattgcctctaaggtggataagggcgtccggttccattgtccgttctacggtcgccgttggggaaccaatcgccagattatcacattgcgtaacgaaccgccggtagacgaagtgacggctaccgtgcttttccatacagccgatgaagtgatgactgtggggaacgacagtttgcgagttgttgagaagagtgactatttgctgcaatccggcaaaagttatacttcggaatacagccagacactgaccttgaaaggcgaagaaacagacaaggaatatgttgcaataaagtccataccttttgatcaatgttttgccgacaatgcgcagcgttggaatcaggggcttcaacgggtactatctgccgacagtccttatatgaaagaaaacgcttacaggaacattgctgtgaaagcattgatgacgttaaactccaattggcgtactccggctggtgatatcttccatggttgtagtttcccttcttatataggattcatcggtggatgttggtcgtgggatgcttggcaaattgcatcgggtaatgtgtactacaatcctgagggggccaagagtgaaatgctttctttgttcgattatcaagcagagaatggtatggttcctgattttatcggttataataaggtacgtaacaattggcgcgactccaaacctcctatagcatcatggggagccatgaatgtctataaggttacaggagacaaagcgttcttggacgaaatatttgataaattgtataggttccatcaatggtggtatgctgagcgtgaccacgatcacaatggcatttgcgaatatggttctactgatggtacactgattgcggcggcttgggagagcggcatggataacggtgtgcgttttgatgacacccggatgctaaagaatgagatggagaaagcttggtcgatggatcaggagaatatttgtttgaattccttcctttatgtagataaactgacactttcggaaatggcttctatcttgggaaagcaagagctttctgaacagttggctaaggaggctgaggtaatcaagctgtatgtacagactaaaatgtatgacagcgagagtggtttcttttatgatattcgtttgaatgaccgtacacctgtcaaggtgatgggggctgaggggtggttgcctttgtgggcaggtattgctaccccggaacaagccgagagtgtgaagaacatcatgatggatgaaaaacatttcaactcttacctgccgctaggtactcttgatgtaagtcatcctgcattgcgtcctactttcggttattggcgtggtccggtttggtttaaccaggtatattttggtataaccggattgaagcgctacggatatgtggaggaagccgacttgctgactcgcaagttcatggcacatgctcaaggactgatgaccgacggaccgattcatgaaaactacaatccactgacaggtgaagtgttgaatgcacccaactttggttggtcttctgctttgattttgcgattgttgttggatcaatgatagtggaagtaaaaatcagtatgcggatactccgaatttattaaaagatatatttatgatgaaaattcgttctatattgacagggattgccatatctttgtcgttggcaggtatggcacaatcccaatatgacggtgctccggtaaacaggagcgctaacgaaacgagcacagacaatgtagaagtgcgtagaaacaaatacccccgttcggataatgattgggagaattttgatgtgcttcatatcaatcgtctgccttcggcggctaattttatgggataccccactaaagaattggcattgcagggtgataaatcacaatctccttacttccaatccttgaacggaacatggaaatttcattttgtaccccgttcggatgaacgaccgatggacttcttccaaaaaggatatgatgtttcaggttgggatgatattaaagttccttccaattgggagcttcaagggttcggctatcctttttatgtaggcagtgggtatggtataaagaagaatccaccattgattgcagtggaaaacagcccggttggctcttatagacgtacttttactattcctgcccattggaataaacgtcagattattctttatttcggaggagtggcttctgctttttatgtgtgggtgaatggtgaaaaagtaggttactctcaggattccaaaacaccttcggagtttgatattacgccgtatgtaaaacaaggggagaatgaaatagccgtacaggttttcaagttcagtgacggatactatctggaagatcaggattactggcgttttgccggcatacagcgtgatgtttatgtgtatgcccgatccgcaactcatgtgcgtgactatgaagtggttaccgatcttgacggggaatacaagaatgctgactttcatctttttgtagagttgggcaaagcaggagaaggtaaaataaaaggggctgaagtggaagtaagcctgttggagaaatcgggtaaaagtatctacaatgagcgtaagcgttggaatgctgccgatcgggaacttcattttaaaaaggaagtgagagaacctttgttatggagtgcggagaaaccaaatctgtatagattgctgattactttgcgtgtaaatggcaaaccggaacaatatatttcccaatacgtcggttttcgtaaatccgaaatcaaacatgctcaattgctgataaatggcaagccggtctatataaaaggagtaaaccgacacgaacacgatccttataacggtcatgtggtagatgaggcatccatgctgcgtgatattcaattgatgaaagagaataatatcaacagtgtacgaacctctcattatcccaacgatccccgctggtatgaattatgtgatatttatggtatgtatgtggttgatgaggccaatatcgagagccatggcatgggatataagcccgatcaatgcctagctaaccagcccgaatgggagaaagctttcatagaccgcacggaacgtatgttcgagcgtgacaaaaaccatccttgtgtcattatctggtcattgggtaatgaaaccggtgagggatgtaacttcgcggctacctataaatgggtacatgccaatgaccgttcacagcgtcccgtgcattcggaagacggaataaagggaccttataccgatattttctgtccaatgtataaaaagatagatgtattgatcaatcattctctctatcttccgtccaaaccgctgattctatgtgaatatgcccatgctatgggcaacagtgaaggaaatcttcaggattattgggatgtgatagagaaatatccctctttacagggcggacatatctgggactgggtagatcagggcttgtatgcaaagacgccggatggaaaattctattgggcatacggaggtgacctggctccgaaaggtactccaagttctgccaatttctgtatgaacggtctgattgccgccgaccgtaccttgaagccgcatatccatgaagtgaaaaaagtatatcaaaatatagcattctctttattggattatcatgagggatgggtagagttacgtaacaagtacttctttacggatttaagtgatttcaattttacttggaagctggaggggaatggtgaacttttggctaccggaactattgataatgtatccctggctcctcggcagacgggtaagtttaagacttcttttccagccatacaggtaaaacccggtgtggagtatttcttgaatttctatgccagtttgaaaaatgaggatggtctgctgaaagccggaacaaaactggctgatgcccaggtgagtcttccattttatcagccgtttgttgctgaggttcagtcttcaccggtgatagcagatgatgcggcttcgttgttgacacttacagccggtaatctgagcgtaggttttgataaggaaaccggtgctttgatttcttataaagagggaagtacggaactgataaaagaagctttacgtcctaatttctggcgtcctgtgacggataatgatatgggaaatggcatgaataaaaccttgcgtccgtggcgtgatgcggggcgtcaggcaaaactgttgtccatgaaacaaaaggcgttgggtaaagaagtttatgaggttgtttctcattataagttgcctgtaggagagtctgattttatcgttacctatcatttttcgggaaaagggtatttggatgtgaactgtactttcattccgggtaacgatacattgcctttattgcctcggatgggggttagtattacactgaacaggcagtttagtcagatggaatggctgggacgtggtcctcatgagaattatatagaccggaatacttcttcttatgtaggtctgtacaagggaagtgtggccgatcagtatttcccgtatgaccgtccgcaggaaaacggtaataagactgaagtccgttggatgagcctgacagataccgccggacagggattgatggttgtcggacagccttatgtcagcaccagtgcttatctgttccctacagaagatttagatgagccaggtcttcgtaaatcgcagcgtcatttatctgatatccagttcaaggatatggtgacatggaacattgacctgaaacagatgggagtgggtggtgacaccagttggggggcttatcctcatcagccttatttgattccggctgaacgtatgtcgttctccttccgtttctgtcctgcaaaacagaatggggtatcgggaaaccggcaatatttgaattttaagtaatataggttcgttcaaaaagaaagctgataattattgtttgcttatttgcggtagtccttttgtgaataatttaaggtcagaagggggatggttcagtaagtgaagtatccctcttaaaaaagcagcttggatagtgaattttatccaagctgtctttttattaatgatatttgccattaccggttaatatcccggattctgatattcattagcattatcaatcagcaataattcggctgtgggaatggggcgtaaatagtgaatgttcttatcgaattttgtgatttgcgggttagcttttgtgatacggctctcgaaagcacggaatcttttcaaggtcatccaacggttccattcacctatcatttcacgcgcatattcatccaacaagaaatcttgggtaacttccgaagctgtgatatccatactatggtcatgtcctttacaggcacggttccgaagtatgttcagtctttcggcagcactttggttgttgcctaatctccagtcaatttcggctgatagcaagtaggtttctcctaaacgataaacaatacagtctgctgaggaataaggtttggaggcatttgaaccggcatataggctaggacaatctgctttcttcagacttgggaaaaacttcagaggactttttgtattggcatagttgtcttccaagttgaaaatggcatagcggcaagcgtctctttcggcttgtgtataggtcttacgagataaatagacagccgtatctcctaaagtgatatcataggcagaattaccgaccctgctggtggatagaccgtatctttgtgcatcggcttcgttccatgtatatccgttcttggtactgttcgtagcgttattcacataataagtgtctttgaagaaagctttatagcgaccgtctttctctccatatagatcaagcatatacttgcttggttccatatagcagttacctttagccagtttgggaacttcgtatccgttgatatttgtggcgtaactgggtgtcatgcccgaaagatagatacctgaggtattgttattgtatgcttcggagtgtttccatacacggttgaaatagtttccacgaggattataagccgtaatggtagagtggcagacaataaacagtgcttcttcattatttttgttattgttctcatcaaatacagcttctacgttatcatagagcttgacccccagtgagcctgcattttgaatcagataatctgccgctgtcttcgctttttccagataggctttactttcgctttccgtcaaggcagtagtattgcctaaaccatctgtgtaggtcgagaaggtgaggcaggctttggcatataaatgataagcggctgcacgtgtcacgtgcccttttacttcctgtgtgataggaagatttttcatggcgaattccagatcttccagaattactttataaaaatcattaaccgaactgcaaggaagaacggaaataggactgttcataggctccaatggcaggtatttacctccccattgctctacaatattatataaggcatgggcacggataaaccttgcttcgctgaccaactcgttgattcttgtttcgcttagaccttccactttgtcggcataatggacagctgcattacatgcactcaatataccatagaaacccgcatatccttcattcaacataccgttggaagcaccgtaatcttcataacggagtagtttgctccagttaccgttggtaccatcgggattcgtatcttgccaaatgtctgttccaccttctgcaaccattagataggtgtcttctgcctgaccataaactatgcggaccaggtcaaagtaacagtcgttcactttcttttcatagcctgccggggtagaccattcttgttctgtagagatgccggagggattaaattcatccaggctacagccgtagacagacaacatcatgattacggctgatatagagagtaatttatgttttttcatcagtataagtttttagaatgagatattaacgccaaatacgtattgtttagacaacggtgcgtcgtcatcatttcctcccttttcgggatcatagttttgtaagtagtcacactttgtaaaaatgaacggattgtttgcggtaaaatatatacgcattttgttaatctttacggcatccaaccattttttgggaaatgtataacctagtgaaatagtttttactttcaagtaggaaccatcaaaataattagcccattgttgatacgggtcctgtccgtttgtaatacttgcatccggacggggatagcgggcactttgattttcaggagtccagtagtcacatacagtaggtgaaggcgtcagaccgtctgtacgataccatccggtcagaccgtaagggattgtccagtcccaccgggcaatcaacaaaatgcttaggtcgaaattcttataattgaaattattaagtaaactgcccgaccatttcggtgtagcgcttcctagaacataatagtcatccgcattcagtttgtaatcgggagtaccattttctgcgatatggacttgtccgggtttctgactgtacttggctgcttcttctgcttcggctgtaccccatattccggcatacttgtatccgtaataagttttgattgcctcaccgggaatcaggtagtagtctccgaactgaagcgggccttcgctggttgtttttatcacttcttccttgttggttgagaatgccagtgtggtgctccattggaatttaggtccgacaaagttacggctggtaatgcttaattccacacctgtattacgtgtttcgcctacattagaccatattttgaaaggagaggagccataacctcccgttgcatagggcaggtttttctcgaataaaatatctttagtatctgtccggtaccagtcgaacgccacgttcagtctgtcactgaataatcccaagtcgaatcccagatctgtcatataagatttttcccatcccagactcttgttggcgatggattgggaataaccgctataagggactcctacatcttgaaatccgataatgcctgtgcggctgtaatctaatgtggcgtattctgaagcaccggcattaccggtgacaccgtaactggcgcgtaatttcagattggaaacagcttttacattctgcatgaagggttcatcactaatgcgccaggcaatagctcctgcggggaacatatcccacttgtttccatctgccaagatggatgaaccgtcccagcggctgcttaatgtcaataggtaacgtcctttatagctatagttaatgcgggcgacataggacattttttggctacctacataagaagaagaaactgtgggtgtaccggttgcggcacctaaattatggtatagataagaatccgtatcaaatttgttggcagtggcggtcgctttttctttttggtcttttgaccattcagtgactccggttattgtgaaatcgtgatcctcttttattttgaagttataagtcagaatattctgccatttataattataagtgaaggtgtttgggatagtggcctgaactagtccgctttctagtccctgatatgattttgtgccggtatacttactttctttcacattccggaaatatccgcctaacagacttttgaatgaaagtccttttagtggagtcaattctacataaatctgtggggctacgctcaatgtcttcacattatttacatattggtcttctcccatatccgccaaaggattcatgttgccgtctcccaacgggtagtctaccagattgccgtcttcatcataaggagtacccaatggtggcatacagagaatacggttccatatacggctgtaacgcttgtcattttcagaatacatggcatataggtttagtccgtattttaccatttcattggctttaaaatctattttggcacgtgccgagtagcgttccagttcgtctcctttcaataatccttccaaattgtaatatcctaaagaaaaataagaggtgacccggtcattagaataagatgtgcttagattgtagctattggtgataccggtttgtgaagctaaatcaaaccagtccacccattgattgttgtctatatatttttgcatatagctgggaaaaagattcccgtcatcggccgggctgttccaggcacctaccgttctttgtgcttctctgcggaagttaatgtaatcctctccacgatttacttcggggaagctggagatgacattccaaccatagtaggcatccagatcgatggagaatttatcttttttaggagttttggtggtgatgatgataactccatttgctccggcagcaccataaacagctgtagaggaggcatctttcagtacttcaatagaagcgatatcattcggattcaattcatcgtaagagccttccatgccgtcaatgatgaataacgggctattgtcaccattgatggagcgtgtgccacgtagggtcatgttcactccggaaccggcttctccactactgcgagtgatatccaaacctgccacctgtccttgaatagcctctagtacattgctggttggcattcggacaatatcctcactttttacggaagcaacagctccagtcaaatctctcttttttacagtgccgtatcctaccactaccacttcatccaatgtttgagtatcaggctgcattttgatattcaattgtgtgtttttgccaatggttatttcttgggttttatatcctatataagatatttcaagactgttttttcctgcgggtacatccaatgtataatttccgtcaaagtcagtgatggttcctatagtatttgcgccttttacagtgacggatactccaattaaaggttcattgttctcatcaataatttgacctttgatagtacgtccttgcaggatcgattgaaccgattcattgttcactatgttacttgactttgcatgcgaataggcaaccggtatgcataggaccattgacaatcctaaaataaggggactacgcataaggctgctttccctgttttgttttggatttttcttcatgtttttcatttttgcttctttattaactcactatttgtttttaaaggttgatgttatatcaaattattgaatctgtttggtttcaatcgtaaacttattaggttagataaatcttttgttttctttcttttttcgtatatctgtcttttaaggccttgatatcttgcttgtatttttgttttctttctctattattgctattttatgattttatatttataaatattaaaatagtttctttattttatttttaatacactgtttgtgttataattatcttatcggtgcaaaaatatacgaaagaaatcgaagatgaaagggaatgtagtatgttgttgaacatatctatagcaaattcaattttattgttttattatattatagctgaaatttggtgttggaaatattaagataaaaaagtccccggataagaacgcctttcttatccggggacttttttaaatattataagatgtattctttatcggtttttatacattctttcataatacttttggtaatcgccacttgttacattttccacccatgcttgattttccagataccattggattgtttttacaataccggtttcgaattttgtttcaggataccatcctaattcattagtgattttggtaggatcgatagcgtaacgttggtcatgtcccaaacggtctttgacaaaggtgattaatgattcgttaatccagtcgatagagatctcacctttgtcgttcaactcttttttcttcaagattttgcgatattcgggagtttccgtcatcatccggtgaatagtggctatggtaagttttactatctgtatgttttctttctcattgtgtccgcctacattatatacttccccttcgcggcccttgcgcagaaccaaatcgatggctttgcaatggtcttctacatataaccagtcgcgtacattctttccgtcaccatatacgggaagtttctttccttccaaaatgtttttaatgattagtggaatcagtttttcaggaaaatggtacggaccgtaattattggaacagcgggtaatggttaccggcattttgtaagtatcacgataagccatgacaatcatatcagcgcttgtcttggaggcactatatgggctgtgtggacataaaggagttgtttcagtaaagaaaccttctgctcctaggctgccgtatacctcatctgtagatacctggtggtaacgtacatctttgcgccaggtgggataaccattctcatcttttcccgtcacccaagcacggcgggccgcatccagcaggttttgggttcccaaaatattagtttgcagaaacaattgtgggttttcaatactgcggtctacatggctttctgctgcaaaattcacgatgtagtcaaacttgtattctgcgaatagttggtctgccaaatcacggtcacatatatctccttttacgaagaaacaacgttcattatcaatgtctgatgcaatagttcccagattgccggcataagtcaaggcatccagtaccaccaccctgatgtcatcatgtttggccaggatgtattttaaatagttggctccgataaatccggcagctcctgtaacgagataagtcttcatattgtttttgatattagtgtgtgcaaagttcggaaagattttttaatcttacaacttatccgctagttctattacttctaaatctttaaattctccattatcgatacaaaaacgtaccaatgttctcactttatgaaatccggaaatgcctgctgctcccgggttgatgtgtaacatatccagtgtcttgtcatatttcacctttaatatatgcgaatgtccgctgataaaaagctggggaggtttcaccagcaggctgccgcggatggaaggatcatagttgcccggatatccgcctatatgctttatcaacacctccgcaccatctacggtgaagcggttggtttgaggataaagtctgcgtatgtcctgcccgtcaatgtttccatatactgcccggaaggggcggaaagcggacagtttccgggcgacttccaccgagccaatgtctccggcgtgccatatttcatcacaattctcaaagtatttcaagtatttgtcatcccaaaatgcatgagtatccgataataatccgattcttgtcatagtttttttgtttattatcggcaaaggtactatatttggaacaaatctaagcataatatggagagcaaatatcattatttcaagcgtgatatcagttggttgtctttcaactatcgcgtgttgttggaggcggatgacgactcccttccgttgtatgaacggattaactttatctctatatattcttctaatctggaggaattctacaagattcgtgtagcggaacataaagccatcgcttccggtggccaaagtgatgatatgacacaagaagaagccagacacctgatacatcagataaccgaagctgtcaatagccagatggaagaccgtatccgcatttatgagcataagattgtcccggctttgcgcaggcatcatattattttttatcaaagtaaacaggaggtagagccttttcatcaggagtttatcagtaatttctttaaagaagaaatttttccctatcttcagcctgttccggtatgcaagaatcgaatcaagacttttttacgtgacaaccgtttgtatctgtcggtacgcgtgacgcgcaaagacacgggggaaaaggaatactatattatcaaattgccttatagcaaagttccccgtttcatagaacttccccgacagggagaaaacttttacctgatgtatatggaagatattataaaggcgaatatcaaccgtatgtttccgggctatgatttggattgcagttattgttgcaagatatctcgtgacgccgatattttcgtggatgatgcaaccagttccgaagttatggtggaacagttgcgtaaaaaggtgaaaaagcgtaaaataggtgctgtatgccgttttgtctatgaccgcaagatgcctgcggattatctggagtttctggtcgatgcatttggcatcaatcgtgatgatttggttccgggagacaaacacttgaacttggaggatttggctcatctgcctaatcccagtaaggaactttgtacccaattgaaacctcgtcccatgacattgaattgtttggatgagaaagaatccatattccgttatgtgagcaagaaggatttgatgttgcatttcccttatcattcttttgaacatttcatccatttcctgtatgaggccgttcatgacccgtcctgtaaggagatcatgattacccaatatagggtggcggaaaactcggttgttatcaatacgctgattgctgctgcgcagaatggtaaaaaagtaactgtttttgtagaacttaaggcccgttttgacgaagaaaacaatttggctaccgccgagatgatgaagcgggcggggatacatattattttcagtataccgggattgaaagtgcatgccaaggtggcgcttgtactgcggtataacaaagagggaaaacagactcgcagctatgcttatatcagtaccggaaatttcaatgagaagactgcccggatatatgctgattccggtttgttcacttccaacgagattattgtgaatgatctgtatactttattccgggtattacagaaagaagtgactgaacccaaattcaagcgtttgttggtagcccgttttaatctgctgccggaactgagaagacgtatcggatatgagataaatatggcaaaggcgggaaaagaagcgcggattatcttgaaaatgaatgcgctgcaagatcctgccatgatagatgaattatataaggctagtgaggcaggagtgaaaatagacttgatagtacgtggtatctgctgcttgattcccaatcagccttatagcagaaatatccgtatcactcgcattgtggacagctttttggaacatgcccgggtgtggtatttccaccatggaggaaaaccgcttctgttcatgggttcgccggactggatgaggcgcaacctgtaccggcgtatagaggccgttacccccattcttgacgaagatctgaaacaacaactgatagatatgctggttattcagttgaaagataacagaaaagccggttgggtggatgaaaatctgaataatgtgttgaaaaggaatccgaaagaagaaccggtacgggcgcaatatgctttttatgaatacttgaaggggaagaataaatgaagaatatgaaataacatattttatcttatttgaaatgattatccgcaatcataccaccggatgataaatggaaatttataaaacggggtgatggaatgcgaactacacggacgaagcggacaaacacggacttaaaatttaaatttgtacttgcaaacccaatgacaggtaaagtaaaaaaatccgtgttccatccgtcatcccattctataaataaacattttgtgatatgattgaggattatcatttcatatattcccaatggaatggacttttacatatttgtctgcccgaaccaccgtccacgactccaggagtaatgcaccgtaagttcgggctgaaaaatccttcagatgtttcagccactccgcaaaccccttgttgacgggcgttccggctgaaggattcggtcatttaattgtttcagcccgcttgcggatgtttcagcctgaaaaacgggcgtccgttccagcaatttgaacgcacacttccaaaaaacaaaagtacggtttcaaaaagccgcgttttttcctgtcggagggtccggaatcctgatacaagttctgccggatcttgcaacaagtttcgcaaattcttgcaacaagttccgattcacgccctcactattccggtagaagtcgttcctgccagaacaccagcccacgcgctgaaagaacttgttcttttcgaaaaacataagttccattaaaaaaaagataaggatgtctttagcaaaagaaaaggaccttttttaaaaacgaacttatcttttttacctgcctgcaagaccggcacttccccacttgccatcgaatgttcctggagaacgaccaggcattttctccaagctcttacttctttttgtgccgggaaagttgtcttttttcgtgtccgccctcggataatgataggtcttgaaactgtcttgagagttttcgagatctcataacaccttacttttaccggctgaaacatctgcaagcgggctgaaacaattaaatgaccgaatccttcagccggaacgcccgtcagcaaagggtttgcggagtggctgtaacatctgaaggatttttcagcccaatcccaaggaggatatagcggatagtttagttttgacacatccggttttaacaggtctgtttgtaaaagatatgtaagatgcggcgatgcatgatacataatgattatccgccatcataccaccggatgataaatgggagttaatggatggaacgcggatttatttcgttctataaattaaaattggaacacaaatgatacaaattaataacagtacagcatggatataaacctgccggaggttagatttgtgtcatttgcgttccggtttaaccgataaataattgatattgttatgaaaaaaatatatataactttctgcctcttactggtttctctttgcatacatgcacagatgattagtggaataatagtggatgaaaaaaacagccactagagtttgccaatatagtgttgttttctttgcctgattttacttttttacaaggtactatcagtgatcaaaccggagcttttaatataaaatcaaatgaaacaaaaggaatattaccaatttcttcagttggctattccactattctcctaccttgcactagttcaaatatgggaacaatacaactatattcagattatactctcgtccatattatgctcagttgcgaagtaatgtaatgtatattaatcggtatatatatgagggtggtaatccatttttattaccttctttatctcataatataactttaggaacaacttataaatgggtatacttatcagccggatatcaatatattaaagatgcgattatttcttttagtggagcttattcagaagatgatcctacgattgctttaattaatatgattaatgcaccagactatgataagatttttgcctcgctggttttatcacctactatggggctttggtctccacagaacaaaagaatcgtatgtaataaaaaaacttagtttgacggctaaggggttcaatctgtccctatggaataattggacttggcttgctccattcatttccgtcttagctgtgttaccatttccctgaaccagggataatttagccagatatattcataccagcggttcagtcttcttttccatttcctgctccacggatacaactcccaccattttagttgaaaatccgttttctgcataaattcgtgggtgggaaacagagtaagagttattcctcttatccataatgttttcatttggttttcccaatattgcatagggccgaatcccggctcccaaataatgaagcggccttcatgaatgccataacaaaccacatatcccggtacttcgaaatcattgatggcaaaaagtatggcaggaaattttctggtggacaattgttccatgttctgcaagcagatttccgcttccattcctgcacgtatagctgcctgtttcatacccatcaacgtatattttccatctactttacaccattcggctagtgtgcgtgcatcttgttgaccgccatagtatttcatgacagtgagcagacaggccacttccatgggacattcgtcactggaacggacaaatgatttttttattctgtcaagttcgtcttcagtcataacttaatttatttttcatggcaggagcaaaacagcaacgcggatcgggaaaatcccaacaatcctttccataagcttttatgatatcactccagcaacggttctgataactgaaacagtcttcaaaaagacggcattccctgcatggactctctttgttgatatcctgacgtgacaaggaacaaaggtgcaaggcttgaggggaatgccagacttctttcagactttgtgtggttacattccctatgataaattgtggatgccagtaaagttgctcgcatacagtcactttaccatcaggcaatataaacatatgagtggtcaatgcagagcattcgcttcctttgaaacaccggcttccaccccaggtatcttgatagtttttatcggttacttctttccctagaatcacgggaaaggaaacctgtgtgagaagagggcgtatttggttgaatacctttgtaatttgcgctttagtaggtttcaaatgcgaaaatacattatactctttgtatatggaattactggcggggataatacgccagtcgcgtatatgcttcagatgagataattcatgcagtaattccgccaagacattcaactggcaattgtagttggtcagcacagatgaaatctgataattcagtccgctgtcatccagtaattgcaggccgtgaagcatctctttggcataatttccgtttactcccagtgaggcggtcagtatttcggaatgaatggcatccagtgaaatttgaacaattccctgataccctgtttcctgtacatcttgcaacagtttttgggttacaggcattttggtcgatatgaattcgggggcaataccccgttttaccaattcttttaatatgattttccagtctttatgcaggaatatttcaccacctatcagatttacttgttgtacttgcaggtctgaagcttccttgatcagctccatcatgcgttgggtggtgagtggggattttatttgcgttgatgtatctgcatagcaatacttacaatgcgtgacacattggttggtcagcatgaatgtgaggagcaacggaccggaatacagcctttttgtagtaagatccagttttttccagacaaaagaatttgcttgcagccggtcaaaccgcaatgctttgcctgccttttccgcttcaatcaatatacgtttgggaaaataaatttctccctgctgggaggaggtataaatgggggtcggattatcaatgaagtccgatacccatttgatcatctcctccttgctccggcagaagaagtcgcacagcagagggagagttgcctgcaaaggtctgtcatacgtgaaaaaactcagcatgacagcttgcagcgggtgaataaaagtatgccagttccgggagcagtcggtatctgtccccgtactggagaataatgcgaccctgtgaatatcatgtctcagatgataatgagggttcagcacatatactttattcatttccggtattttcatcttgtgtttttgtaggatcgacgaatccacctgtatagcatcccaggccacatttggataactccttgtcatctatgccaccttgtacgtccatcagttcgttcaagtccagcacttgttcttcatcttcggaatagcgggtgtattccggttgcttgttgttggggtcttcttttttcatattcttctttgtttaagttggttattctctgtagtgaaaaaaaacggtgttactccgtggtggaaaacaattcatacacgggtgcgaaaatcctgctcagtatgctccggctcgaagtgatgatctccgcccggccggacatgtctatttcatattttatttcctttctgttggttgtcaccagtccgtccggaaagtccacttccacggcataacttttattgtaaggcacaaaagagacggaggcgattcttcccggcagtacgccatacgagtgggtggggtatttgttcagttcgatatttactttgtcgcccacggcaatttccgccacttcgtcttgtgaaagagtgatgtgcccgaggggattcccctgctgcttggagataacggtgcacagggtgtctccttcatttacccgggcgctcatgccccatgtctttccccataccactatgccgtcgtgatggcttttgatgaggtacttcttgtcccacgtgcggaggctgttcaccatgttttcgtaagccagttccagcatccggaggtttttggcagtctccatccggtggtttatatccagttcaaagagttcgcgtttcacattcagcaccgccatggcatctgccttaccggtactttccagtatccggagttcttcatctaggtattttttcttctgcggatagatatcaaactcctgatacatcacgcacgtacgcacggcttgggtgaactgttcgtaggcggaagacatttcacccatgatgaggtcaaagggatagtcttgcaggtacttgatgtcgttggtgcggtagtaccattctattttggtcagtacgcggcaaaatgtttgtacgtcttccagtagggcagtatttttcagtatgcccagcgtgtcgttcttttgtacaggtgattggttttccacaaaaaagcggtctatcattcctgtctgattggcagtgatccattccgcacttcccaagtcgtcaatggttatcgtttttcttattgtgtcaggatacttaaataatgccgtgcctgcaataagaaaaacaatcagtccatatacgatgtagcttcccgtatggatcaaccattcgggcatatctcccagcatatcattgttttcgcggctatatacttctaccttttccggtccgtccgcatcaggtttatagatttcctccataccttattgctattattttttaattctcaattctcattttttaatttcctaagcgctcagttccagctgattcttcaccagcctgtagtaatcgccctgccgggcaatgagttcttcgtgcgtgccccgttccgttatctccccttctttcagcaccactatctggtcggcattctttacggtgctcaggcggtgcgccacgatgaccaccgttttgtccttgaagaatctctccagattttcctgtatcactttctcattgtccgtatcgagcgcattcgtcgcttcatcaaaaaacaggtaatcgggattacggtaaatggcgcgcgctatcaggatgcgctgcttctgcccttggctcaatccttgccccgtgttacctattttggtgttatactttaaaggcaaggattcgatgaactcacgtatatttgccatctctacggcatacagcaggcgttctttgtctatcatgctgccatccggcgctatgttgttggcaatggtatcgccgaatatgaatccctcctgcatcactactccacaatgtttgcgccactccttgaaactgattttttgtagcgactgattgcctatcatcaccgctcctccggtgggaggatagaatccgagcatcagttttatcagcgttgttttcccactgccgctgaggcccacgatggcggtagtctttccggctggtatgtccagcgatagccctttgatgatgcgtttcgatttttctgatccgtaagtaaagactacattttgcaattgaatcgggtctttgcctgatatttgggtatcctggtccatgccttctgtctcttcatcgggcttgccatgtatttctccgagacgttccaggctgagctgcgcgtcctgcgtgtcctgcatgaaggaaacgaattggctgataggcccttgcatctgtccgatgatgtactgtatggaaagcatcacacccagcgtgatacttccatgtagtacggcggtggcagagagaactgttatcagtacgtttttcacttcgttgataagtacggctcccacctgctgccactgccccaggttgagtgaactcatattaatgcggaagagagaagcttgtatgttttcccattcccagcgtttttgctgttcgcagcccagcagcttgatgtcctgcataccgtagatgagttgcatcaaattattctgattgacggacatctgttcaaagttcttcctgttcaagtcggcccgcttgcgcatgaacagctttacccaacccatataggctgcgctgaacaggatgaaaatgaggaatattttccagctgtatatggccagcacgataccgaagatgactaccgtgagggtagagaacaaaatattgagcacggactgggtgaggaaactctcgatgcggttgtggtcttcgatgcggcgtatcaagtcgcctgccagtttgctgtcaaagaacctcatgggcagccgcatcagcttggagaggaaatccgagatgagcgacacgttgacgcgcgtactgatgtggagcagtatacagcgccggatcacctcaataagtgtgcggctgaataccagcatgagttgtgcggccaaaatgagctgtataaaattcagattcctgtgccctatgccttggtctacaatggtttgtgtaagaaaagggaagaccagttgcagcaaactgcctgccagcaggccgatgatgagctgtatcatcgcctttttgtagggacgtacatagtgaaacagataccataatgacagcttttcatattttatgggttccgcttcataaaattgcggggtaacatccagcaagagggcaattcctttttctattccgccttgtgtggtactgatccagcattttttcaactcctgttcctcatatttcagcaatccgtaggcagggtcggcaatgtagaaccaagttttgccccttttcttttctattttatagaggaccacgaaatgttcctggttccagtggatgatgcatggcagttttgactgttgtttcagtttttccattgaagtgcgtataccggtggcgcgcagccctatgctggctgccgcttcactgatacctagcaagttaactcccgtgcgctgtatgtatgattgctcgcgtaactgctgtacggagaatgtctttccataatattgggctatcattctcaggcaggaggggccgcagtccatgccgtccaactgtttgtagaatggaaatttgctcataattgtcttttttgttttactctgtttatcagccagtcggctatttcgttcatcctttcactttcgctctcaaagaaggcgcacaggtgtttttgccgttctatgatgtattcccggtttgccagtagatcaatgatctgcctgtccagtttcacgggggtaattttttttatttcctgtggcgtgaactctgacatgggcacatgggcaaaggtgcattccgtccagtgggttattcctccggtgataagcgccatgtcgcacaagggcaacaaggcttgcaggcggggcaggcggtaaatggctatattgggcggtaatgaaaacaaccgggtttccacctctccatgattggtcagcaggatgaattgatattgcggatggatgctcgcactctgcttcatggctttgtagaatgattccatatgtgagggggtgttcacttttctttcttcttcctcgtcttccagcaagcctataataacagtgcgtgaacggtcttcttttatttccgtcagtttgtcgatgaaatcatcgtcttttgcaccttgcggcagcaatttataaggaataggcggcagggtgacgacgggcatttccggcattaggtctatctttctgtcggttttgtttatggctataaacagatagtttatgtcatattcattatagacttgctgcttatcttgcagttgatagtccagcaatgccaaatgtggcgtaaaccatcggaaatcatgtggataaatgatgcgtcctattcctttccgcagcaaaccggtagtgaaaacggagtcggaggtatcggtataatagaccttgtttccccgttcactaatcaggtatgccagtcgggtggtgggacatacatttcctgcatccggttttatatcaaaaagaaattcaaacatgccccgtttttctcatcacatttcaattcgtattatcctactactttaaagcctaatgacgtatatagatttttgccatcataataatatgttcctaagaatttatcgaaaaggatgcacacttccagttcatcgcgcatataggcaatgtactcaaagagagtggaacgtgacatatccatctttgctgcaaattccttggatgtgcctgtgcacttgtgccggataagaaaatccatatagaggattttcttaaggtctactcgtttcatggtctttgtagttttttaggatgaataattagggttatcttttaaaagctccaaccaagtatttcccatcttcactagttagttctaatgtatattctccggatgggaaactggctatggaaatgataatatagcttgtttgtgcttggggcactaactgttcatacatcacttctcctgtttgattaccggtgatggtaatttgtatgtcacagtccggagatgtgttttcaatgtagatgttctggccatcggtgcaggctgtgatgggaatagatggcaggcttcgtgtattaactttttcttgattgctataccacttcccatttataataatttctgtactattacaaaaagaatacactttctgcaccgataaaccactaagcaatatggtgaataataccatacgcaaactccaaatctttaattctttagttgttttcataataatattattgattgattgttatgctgcaaagttatggatttagaatgaaaaacagatagaccggatatgtacgttatatggacaattaaaaaagagataatatgctaataattagaatattacctctttgtgcgaatgcggaatgtggacagttgcttccctagaactcccatagccacagatccagtgtctgtcctttgccgaatgctcctatcttttgagtgatacgttctttcaatcttaattttcttttagataccgaagtcgattctatccccagcaaatcagctattcccggattggctattcccaacttgatgaagcagcatatctgcaaatcgctttctgtcaatgaaggtacaagagtggaaagccttactatataattatcgaataatagattcattgtttcctttacctcttcccattgctcgtctttcatgtattggggctttgtctttagccggtaaaggacatctgtcttttttatcagttggttgcacaggaatctttcacgatcatgcaatcgttggttttcttctcctaaaagtcccaatctttcaagttctttggacttttcattcagcgaagaagaatatttatcaatatgttgctgcaacattttattctcttgttgcagggcttcattttggcattttatttcagatagtacattcttttgctcctccaactgttcctgcgcatctttattcgcctccatttgttctgccagttccttcatgcggctttggttacgactgattattctctcattctcttgtctttttaaggtattcagctgtatttcttcttcatgtctttgtatgatatgctctttacggattaattttcgctggtatatatagataaggatagctatcaggcagaataccactaccaatatgattagtacattacggatgatagtattattttctatttttagctggttcttttcattcaatagtttttgctggttatacttttcctgcatattcataagctctttatttttatgcaatttccagacagaatcttgataaactaccatactatcgcaatataggctcattttttcatagtcttttttctctttgcttagattatataaaatttcataagttgcacaaatcgtttccatgcgattggaggataatgttttattcagataataataggcagaatctgttttattaatgcgtctatatatgtcaccaattaccaagtaactttgttctagccttttttttaggggtaattcgcttgtttctttaagtattaaagctttttgggcataggatagggcaggttgataatcttttgtttcggtatatactcctgctaattcgttcattccatttattaatataccattattatgtagagtttctgccatttgtatagcttctttataatatttgatgctattatcaaaatcaaataatacggaatatacttttcccaaatcataatatgcagaacatatataattcttattttcggatagcttcgcatagtgcaatgactgtttaaacatttgcaatgcatattcattcagcgaattatataggtatatatttcctatactgctataaatcaaatgtgccagttgatagtctttcgtcttttctacttcttctattgcttttaaataggattcttgtgcttcattctttttatcagctttttcatataatacacctttataataaagtaccattgctttccgttggggattgtcttgcttcataaagtaatcataggctatattaattaaggtagagtcagcaagttcttctttataattcttatacttggcttgcactgttagcaacgcccaagtagcattttgcaatttgtccgatgatgccggaactttcatcccttgcaatacacccagtgcactatccggatgttcatacatcaccgcttccgcttgaaccaattcaagcaacaacgcttgttgagaagcattttctttttttgtgcaggcagaaaggagtatacttattattataataataaagtttctttttattccaattgtttttttcatagtatttgcatttatgtatagcgaacaaatatagaaattaaaaacgatcttgaaaagattttatatcactatttacaaaaaaagagtgattgattatagtttgcatccagtgttgatagaagtattatggatcttaaatattcaatttagtaaggaggcatgccctccttactattttatgtataaaaacggctgtattatgtatatctatttgaatccacaatatgtgattagaaacgaaaataattgttcttatatcattgctaaatcagctttaattactgctaagctagaatatgccatggcttttgcaagcgtagttccaccttctattggatatatcttgtcacatattggagaaggagaattaaatgcttcaatagaaaatatagcaaataccctaaatataaaaccagacctgatagataagtttattcgaaaaataatcgataatccagtaaaagtaggatggaattataaaggagtgacgatttcttttcccccgtatctgctgacttctgttaaggaagaatcggagggaagtgtttatacggataatgaattattttatactacagactttatacctaaacgtccttctgttccgctgaatcttaactttatgattacaacccaatgcaggacggattgtatgtattgctatgcggatagaaacaggaagaacgatttgacaagttggcaaattataaaggtgatagatgaagctcatgatatgggggggaatctggctttgacaggaggtgatatttttgctttccctgattggaaagaggtgatacgaaaagtggggcaatatggattcacacctttattgagtacaaaaataccgctaaaagaggatgatatttactttttaaaagagtctggaattaaattcttgcagttttcattggattctatatttccctctacattacagacaatggtacgtgtaaaagaagactatatagataatgtgaagcaaatgtttgagtattcttaatccaatctgtggtcagattgataagaaaattataattcgcaaataaaaatgaggattaaacttataaatatttgtaacaaatgattgaagcaagagcattagtttctattaattttctgaatttgtcagaaaactatgattttatgtcacgttggttaggtgtatatgataaatatgcaaagctattgaaaggttcgtcggatgcagttgtaaaagacggatctggaaagatacctgaatcagcaaacgataaagtggatttaaccaacaagcatttggcattacaggctatattagctgaatatggtcaaaagttaaataaaagccatctttattctgaaacagtcggtctgtccgaagtccatgatattcgtcgcaaatgtttcagcgcattacagatgaacatcaagagcaagagatataggaacaaaagaagatcaagatgctgcaaaaagccttattgatcagactggaaattataaaatgaataagataattacccgttccgatatgtctgcccgtattgcaggttacattttgattctgcaatcagagaaaaaccatgattcagtagaacgactgaatctggctgatcgcatcactgaagtggaaaaggcaaataatctttatttggacttagatacacagcgtggtattgtgaaagaacagaaaggtctttctatgagaatacgaaagaatgttaaatgaaaatctttttttgttcagtccggaggcgtcggactgtgggagattacatttgcaatgtaattaagaaatcacaatagtttactagtttgttaattttaaaatttaacgatcatgaaagacgacgaattaaaaaagcaggaagtagtaaatgctgaaagtgaaaaacagaatgttactacactaaatgaaaaacttgatttctcagatttggaaaatgtagaaggtggtactgtaaaagacttcaaagatgatgagcatcttaaaagtgaaggtggtaatgtaggtgttggctgcgtttgctaataacggttgctgtatctcctaacaattgtatcagaagcggtattttataatctataaacatcctcttctgatacttttttatatttttatggtctaattaataccttattatatgaatttggaaaaaatacacttgataaaaagcaaagatatgtgcttgtcatattattatcctacagcagatattagggtaataaataaggaaacatatgatatattatcggcattgaaagaatataaagatattcatgaagccttagaattatatagagatgaagaacaagtggtttcattaattagatctatatatgcttcaaataaaggcgagcatagcacaaatattcaaaatggaagtaaaagaaaagtgataaagcgaatcactttacatatatctaatgattgtaatttaagatgtaagtattgttttggtggaggtggaagttataatcaagaacgtaacctaatgacagagcaaacagcaatagagtttgtagatttttgtgtagaacaatttgaaagagttgaaaagattgtcttttttggaggcgaaccgatgcttaatcttaaaggaatggagatagtgtgcaatcgctttaaatattataaagaagaagggaaaatagatattttgcctaatttcgtaattattactaatgggacaatattaacagataggatgctggcatttatcaagagaaatatttcagcaatgactatcagtatagatggtcctaaagaaattaatgatattcagagaatatataaaaatggaaaaggaagttatgaaaggatagctcattttatccatactatacaagaaaaaaccaatgtaaaaatacagtacgaagcaacctatacgcagttacatattgatcataattatagtcatgaagatatttcaaaatttatggatcagacttttggaattgaaggtgtagtggtcaatgatcaagaacttagtctgcaattattgcttgatttatggaactccattgatttggaatatttaaaaagaacagaactgaaatatttgcctaaagatttttggttacttctacatgctattgttcataatacatctactaatatatgccctgttatagatcagtatttagctgtaagcactgatggaactatatacgcatgtcatacaataaatggtattaaagaatgtaagttaggtagtattgatggctataatgtttataattatccagaattatataaaccatttgatcatgaaatagattttagatcaaatgaaaagtgtgaaaaatgttgggcacaaagattatgtggaggatgtactgtacatagatttttcaatcataaaataaatcaatttgaagcataccctaatgaagacttttgtaaaataacgcttctttgtatagaacaaatattattaataattgcatctatccgcaaggaccctcaattatggtctttactcattcagaaaatgaataattaaaattatatattatggaaaagttactttatattatgttgatttgggtagtttctactacttctatatattcacagacagtagctggaaaaattgttgatgaaagtaatcagccgatagaatttgctaatatcgtatgtttatcattgcctgattctacttttatatatggaactatcagtgaccaggatggaaaatttaccatacccgaaaattcatctaaagggatattacgcatttcatctgtaggttatgctacaacatataaggaatgtaaggacaggaatataggcactatcttgttgcactcggatacacaactgctgggtgaagtagtagtgaaaggcaatttgcctgtaactcgcatgaaaggcgatgcattggtaacaagtgtgcagaacagcgtattagcaaaggcaggatcggcaaacgatgtactgggaaaagtgcccggtatattgaaggataaagattcctttgaagtattcggcaaaggaacgcctcttatctatatcaatggcagggaagtacgcgacaagtctgagctggagcaactcagttcggaagatattaagcatgtagaattgataactaatcccggtgcgcgctatgatgccactgtaaatgctgtggtgcgcattcagactatccgccgcactggcgatggattcggattcaatctaaattccagttattatcaaagtgaaaatgtagacttagtggaacaggcagatgtgaactatcgccataatgggctggatatgtttgccatgttcagatatgataagatggaatttcgtgaacgcaccaatgtacatcagactttaatttcaaagaaacagctggacttggaaaatcaattgaaatataatgataataagcaatggctgcgaggaaatatcggaatgaactatatgtttgatgaaaataattctatcggaataaaatactctattcagggaagccccagatatgatagtaagctttatacaactagtaaagtcagtttagacggtaaggtatttgatcgtttacagaattttacaagctcagaaacagataatgaattaaatcatcagttgaatgcttactatacggggcgcgtgggtaatctggaaatagacttcaatgccgactactatcaaagcggttatttacaggaggacattactggcgaggaaagtgaagagcaggaggaccgggatgtacatgctgcaagtgatgtggcaaataatttggcagcagccaaactggtgttgtcctatcctgtgtggaaaggaaaattttcagtaggcggagaatggacttatacccatcgcaaagacaattatctgaatgttgaaaattatgtgccttcatccaacagcaagatgaatgaaatgaatataacggcttttgccgaatatagcagatctatttccataggcgactttatacttggtgcacgctatgagcaaataaaatttgattattataaagatgatctgcatatagatgaccagagccgtagctatgataatatctatccgaatgtttccttcaatactcggattggaaaggttaagacgcaaattagttatacggtaaagacgcaacgtccttcatacaggctgttgagcaatagttcattatatatagaccgtttcagcatacagcagggaaatcctacattgaagtccgaaatcactcataatcttaactggattgcttcttggaagtttctgcaactcagcttaggttatcagcagactaaaaatgctataatctattggggtgagccattgaatccgaatgaatataccattttactgaaaagtattaatttgaataaaagtctgcctatgctgaatgcctttatttcggcttcgcctcatattggtatatgggaatcccgtttaagtcttggaataactaaacaatggctgactattgatagtgatgggcaacaattaaaattgaatgaacccagatttacgggtgtgctgtctaattcatttacattgccagaaaatttccttcttagtttggatatgcaattcaggagtaagggggatttgcgcaatgtatattttgatcgttttaatagctatgttgatatttcactgcgaaaatcattcttgaatgatgctttgagtatagaggtaaggggagatgatttgttccgccagcaaaaaagtaaaacgcttcttcgcagtggagcatattccttctcaaaagatcatagatatgactcgcgcgagttctctatttcattgcgctataggtttaatacaacaaagagcaagtataaaggtacaggggcggccaatgatgagttgaggcgcttgtagggaaactgtgtttatagaatgaaatgcagagtaagattagatcctgactttaatgtaaatcatatttctgctttcttttttgcagactcaacactcttgctatatattccactctgtttccattaaattagtctgatatatctttttttttaagtttggtcactttaaagaaagaaactatccgactgatatggaaactttgttagaaaaggatttcagccattttttaacaggctcttatgctttggacatgaagaattgcttgtaggagatcttacaaaagaaaatttgaaagaactttgggaaaatagagataaatggagaatgttccgaggaggatttagtttggaaaatatagatacttgttctacttgtacattaaacaaaaagtgttcactgatgacttgtcgtctaaggaattatgatcaaggtaatagcttctataataaaccgatagaatgtgccgttgattattctatagctttgtaatataatgtacttttgaaactttaaaaatatagaatatgagagcgaatatacttttttgtttatacttctttatgggggtggcagtgcagctgcaagcacaggttacggtaacaggtaaagtaattgatgagcaacaacaacctgtcccttatgccaatatagtgttactttctttgcccgattctactttcgtggcaggaagtatcagtaatgaagaaggcgcgtttagtctcaatgtcaaagaaacaaaggatgtgcttcgcatctcatctattggctatgctactgtttatcgtccattagataacagaagtacagatcttggaattatctgtctcgcttcagacacacagatattggctgaagttgtggtaaaagctgatatgcctgttactcgcatgagaggcgacgcactggtgactaatatacaaaatagtgtactctctaaagccggatcagcaagcgatgtattgggaaaagtaccgggtgtaataaaagagaggaattcctatgaagtacttggcaaaggaacacctcttatttatatcaatgggcggcaggtacgtgatgattcggaattggatcaactaaattcggaagatattaagagcgtagaagttgttactaatcccggtgcacgttatgatgcaactgtaactgccgttatccgtatacagactatccggcgtgccggagatggtttcggcttcgatctccgttccagttactatcagagccagaatgtagacttgatagagcaattgaatgtaaactaccgccataatggacttgatatttttggtatattccgttatttaaagaacgaatatatcatgaaaaatgatattgtacataccttggagtctgattctttatggaaatatcagaatctattggatggaactgtagtagacaagtctttacgaggtgaaataggagctaattatagcctgaatgataaacattcactgggattccgctatactcttacttcccgtccaaatacgaagtcggatgtatttacctctaatgatattacagccaacaatcagttttatgaccacttggaaaatcaagagtattcttctacttccggtaagcctactcatcaactaaatgtttattataatggtactgtgggagatttgaatattgattttaatacagactattatactaatacttctacaggaaaaggtctttatcacgaagtcagtcaagagcaagaaagtcgggatgtgcatacacagagttacatcagaaataaattgctagcttctaaattggtactttcttatccgttgtttggaggtaatctttcggtaggcggagaatatacggatacccgtcgcaatgacgagtaccgtaatccggagaaatatgtggaaagtaccatcagtcgtgtagaggaagatggattgagtggctttgccgaatacagccgtcagttcccgataggtaacctttcattgggtgtaagatatgagcatgtaacttttgattattataaggatggtgtgcacatggatgaacagagccgtatgtatggaaactggtttcctaatctttctttttcaagaaaactaggttctgtccgggcacagttgagttatactgctaaaacgcaacgacctacttatagccagttaagcaacaatgtcacctatgtagaccgtttcactatgcaacgtggtaacccattgctggagccgtgcaccattcacgatatttcattggtcggtacatggcgttttttacagttacttgtcagctatcagcagtggcgtaaggaaatcatttattggggagatccgatagataatggcaattcaatgatgatgacttacctcaattatcataatcgtccgactttgaatgtttctttctctatttcaccggctattggcttttggcatcctaacctaaatatcggcgtgaagaaacaatggatgacaatagatggcatagagtttaataagcctcgtcctacaataaggttcaacaatacatttgaacttcctggtgattttcttgtcagtttggatgggctttttatgggaaaaggaaattatcagaatttgtatcagttcaaaaattatggtacagttgacatctctgtccgtaagtcatttttaagggatgccttaagtctggaacttcgagggaacgatctttttcatggttcacgtaattattggcaaacatattttggcagtattatttgggagcagactaatcaatgggatactcgtgaattttctattactttgcgctataagtttaatacaacaaagagcaagtataaagggacaggagcggcaaatgatgagctaagacgtttgtgataatttcaaaaaaataaaaagtatagaacatgaggaaattgattttactactcggattagtgttacaagtgattattgttaatgcacagagtgtttccggctcattagttgatgaaaaaggaaatcctgtcagttttgctaatgtggtattgctatcttccaaagattcatcttttgtgcaaggtacaattagcaatgaacaaggaattttcagcatagaccaaacaagcggtaacaatatactcagaatttcttgtcttggctttattccggtgacaaaagcctatgctcaatttccggtaacgattgtgatgcatgaagatgtttaatctgttgggggaagtcgtggtaaaggggaatcgcccgtcatataaacttactgccgaagggttgcagacccatgtgcaaggaacagtgcttagcaaaatgggtacggcggaggatgtgttgaagcatataccgggacttcagaagaaaaatgatgcgtatgaggtatttggaaaagggagcccgataatctatgtgaatggaagattgctgcgtgatttgtcggaactggaccagctgaagtcagaagatattaagaatgtagaactgattaccagccccggtgcaagatatgatgcgtctgtgaaagcagtggtgaagattactacccgccccataaaaggggaaagatttggatttgatgtgcgttccggttataatcagtgggagtatgctggtttcgtggaacagttgaactggaattaccggcgtgataaattggatgtgttcggcaccgtgtattatagaaaaagtgaagggtttgacgaaagtcggtttactcaagatgtgcatgttgatacgctttggcatcaggacaattatcagttcgcaaaaacgaatcaacaggcatttaccaatatcgcaggtgtgaactatgcattcgatgaaaataattcaattggagtaaaatatacattgaaagccaatccggatgcccgctatcacactatatttaattcggatgtatatgccgatggcacgcattatgactatctggcgaatgatatcaatgccactgcgtattataatccctcgcattcggtaaatgtttattataaggggatggcgggaaaaacggagattgattttaatgcggattatctgtttgacaaaaacggagacaatacgatacaacgtgaagaaagcagcaataaggaagatagggttgtcacttctaccaatacattgagaagtgaactctttgctgccaaactggtgctgagccgtccgctgcttggaggaaatgtcatgataggggctgaatacagtcatacggagcggcaggatgattatgtgaatccggaaggttatgtgccgacttcattcagtgaactgaaagagcagaatatcagtccgtttttagagtatagccgcaatacccccatagggcaactctccgtggggggacgttatgagtgggtgaactttgattattatgaggatgggaaatatatggaaggacaaagccggaatttcagtaatttctttccgagtgtttcattgggttctgaaataggcggagtgcagttgcagcttagttatgcggcgaagacgcgtcgtccgtcctaccagcagttgagcaataatgtgacgtatgccaataggttcacgcttcagtccggcaatccgttattggaacatgaggtggtgcataacgtttctttgatgggggcatggaagtttatgcagttcagtatggattataatgacagaagaaatgcaatcatttactggggggaacaaatggagtataatccggcggtaacgcttatttctttcaaaaatctccatagcttgaagtctgtttcggcattcttgtcattggcgcctaagtttggaatctggtcgccgcaattgaattggggagtacagaaacaatggctggatctggagactaccgatggattgctgaagatgaacaaaccgatgtttacgggggcttttaataatacgtttaattttaatcacggctggatggcttcggtggaaatgaattatcaaagtaaaggcgatatggagaattgctcggaaaccaagaatattttttatgtggatgccggggttacaaagttcttttggggggataggatgtctgtgaaactgagtggtacggatttgttccatggtatgaagtctggaaaccgtatgtattataaccgggcatcttctttgcaaattaataattatgatagtaggaaagtgatgctgacggtacgctataaatttaatgctacgcgtaataaatataagggtagtggtgccggagagagtgagaaggaaagattatgagtgcctacttttcacatctcatttgttcttacccagcttatataccatttggcggaataaaggtacgtttaaccatatatattcgtaccaatgttctacctttcttttccatagtttgctccagctatatatttcccaccattttagatggagatttgccgaattcataaaattttgtgtgggaaagagggtcagggctattccttttatccataatgttttcatttcgtccgcccaatattgcatgagtccgaattccggttcccagataatgaatcgggattcatggatgccgtaacagactacatatcccggtacattgaaatcattgagagtgaaaaggatgatgggaagttttctttgtgttaattgatgaatgttttgcaaacatatttcggctttcatgccggaatatatagccccttgtttcattcctgccaaggtaagctttccatttattttgcaccattcggtcaatgtatgtatgtccgtttcttttccgttgtaatattttatgacagtgagcaggcaagctacctctacagggcacttggcattggaacggacaaatgatttctttattttatcaagttcgtattctgtcataacccggtttgttttataagaggaaactcatggagcggccgcaatcacttaaaaaagaaattcattggagcgattaacgttcatttggacgtggaagtaggtatgaacgctgaattactttaataaatgtgcggccgggtgtccgcatgagttatatctgttacgttctgctctttctattaacatatcggctattttgtttatttcccgatttttacgttcaaagaaatcgcataactctttcgctttttgtgttagtgttattttattttgtaatgcatattctatttgttgctccaatttcatcggagttatgtttatcatatttttaggcgaatatctcagtaccggtatttgagcaaaggtacaatccagccatacatcagaatatgagtcggtcaaagccaaatcgcataatggcaatatggtgttaaggttcagcgtgtggaataattccatgttgccgggcaattcaaacgattgatatacatttggtatgtcggttaataatatgaattggtaccggggatttctgatggaacttctttttataactctataaaaatcttctagtatctttgaatttttatttccttttcccaataatccgacaataatatttcttcctttgtctttttttatatcctgcaatctctttgccaacgattccacacgtggtccggaatcagatgacaggtagggagtgggtggcagataaagtacagaaatatctttgtcctgtatgtttttttggttcggcaactgcatggctatgaaaatatagtcaatggctagctgccgataaagggaggcatgtgctgcatgccgacaatctagaagcgttaggtcgggctttaaccaacggaaatcatctggataaagtacgcagttgcttattcctttattatatagtacaggcgtaaaagcagggtttgaggtataggtatagtatacctcttgtttcttttcccgcaatatccctgctaatttgatggttatcaatagctggcttttgtctggtgttatgtcaagaaggaaattcagcatatattattgcgctaatatggatttgtttaatgaactttttggacaaattatattcatagaaattggaacatgaaagttccaatttctaatgaatcaagttagcggtttaggtatattttagtcgggttatgaaaacaggtctgtcactcttgagtgaaatatcccgttaaatgtccggaaggtgtacctgttatttctagtttaggcactataaaatattttgtgtaaatggaaatacgggattcagaaatgagtctcgtattttttattttatacatttgcaaaatgaagaagcttatgaaagaaaagaatcaagtagtgcctgatgaggttttaagcaagtttatcagtcagttcaagacagaagccgatgtgagcaagtttctgaagcagttgcatgcccaagtattggaaaagatgcttgaaggtgaaatggatgcccatttgggatatgaaaagaattctgtgataggaaataacactggcaactcccgaaatggcagttatccgaagaaaatccaaaccgaacatggagagtctgtcatttctattccacgtgaccgtaacggccagtttgagccgatagcagtgcctaaacatgaaagccgtggactttctatagaaaagctcgttatctccctatatgccaaaggaatgagcgtttctgacatagaggaagagatgcgtgagatttatgaaatagagctctctacatctgccatttccatcattaccaacaaggtcaatcaggctgcccaggagtggcagaaccgtccccttgatcctgtttacctgatagtctggatggatggtattgtcttcaaggtacgggataacggtaagatcataaacaagaccgtttacctttgcgtcggactgaaacagaacggtctgaaggaagtccttggcatgtgggttggcaaatcggaaagctcttctttctggatgggtgtcctgactgatttaaaagcccgtggggtgcaggatatcctgattacctgtactgacaatctgaatggatttacggatactatccgcagtatattccctcagtcatccactcaaatctgtgtggtacatcagatcagaaactcctgtaaatatgtggtttataaagataagaaagagtttacggcagatatgaagaatatctataatgcacccaacaaagaggttgcagccacagaacttgacaatctggaaaagaaatggggaggaaagtatccttatgctatactttcatggagaaacaactgggatgatttgactgttttcttccagttcccgctggaaatcagaaaaataatctacacaaccaatctcattgaaaacctgaacggaaaaatcagaaagtacacgaaatcaaagctttcattcccttcggatgatgcagtcaaaaagaccgtttatctttcacttatggagattgagaagaaatggacacagccgattcataactggggcttgattatgaatcaatttatgcttatttttgaaaacagaatccagatataagaacaaacttacagctgaatcctgtttccatttacacaaaattttggacagtgtcctagtttatattctcctgcagggaaatttgcaatagaaattgtgatgtaagcgctctgtacttcaggaatattattttcataaacgacgctcccttttgccatatctgtaatgcggatggtcatatcacggtcgggtgatacgttcttgacagtaaggagatagccatcggtaaatacagttatggggcaattggtagtcgcacttctaataggatcatcccatctgccatccaattctacatctttaacaggagtttctgttgtattggcctgtgcaggcaaaatacctattaatgtagttatgataataactataccccatatccttttctttatactttttaacttcataattttatgttttaattgttttgtttgaggcaaagttagaggataaattttaaaaacgtgcagatatcatgtggacaaatgaaaaaaggtaataagttaataactagcttattacctttttttatagggaggtgatatagacaattgtttatttttagtattccataagccataaatcaaggctttgattttcgcctaatgaacctatttcttgtacgatgcgttcttttaatcttaacttccttttggacacagatgtgggcgagatggctaacatgttggcgatgtcaccgttgctgaatcgtagttttatcaaacagcatatttgtatatcaccatctgttaaggaaggtatttgatggtatagtcttttagtatagttatcgaataataaatctattttttcttttatttcttgccatagttggtcgtctatatactttgttgtttttagtttattgaataattctgtctgattaatgagttggttacataaaaaagcctcgcgtttatgtagatactggttttcctctgatagatgttccattgcttccagttctttcgacttttcttttaatgattgggcataattgcttatatgattttgcagtttattgttctccagtttcagcatttcattctgttgttgtatttcttgtcgtattttattttgttctttccattgttcttttatctcttggcttccttccatttggatcgtaagttcttctatccgcattttgttgcggtttatcaatgtctcattttcatgtattttcatagtgaaataacgaattttttcttctttctccaatatctcttgtttttgagagactatttttcgttggtatagatagtttgttattgctatgatgaaaggcaaaatgattaaggcgatgagcacattgcgtatgatccggtctttctttatttgtgacagattattttcattaattattttttgctgatcatatttttcttgcatctctattaatgctttattgcgatcagttttacctattgaatcttgatagaaccatagtttattactgtactctactgcctttttgtaatctttttcttcttgactaatataaaatagtgcttgataggcgctacgggctgtatggatattaggtgacagggaggcttggtttaagtaaaaatacgcagaatcgtacatttttaaatagcgataagtatctcccagtgaaaatatcctttgatcagttttttttattttaatacaatcttttgcatactgaagagcctttttattttctcctgttttaagaaataaaaaactggtttcgttcatggcgcttgccaatatggtaggatagttattcacttgtcctatttttatggctttttcataatattctatcgctttattatattgttttttctgtgaaaatgctctagcgatatagatgaaagagaaagctatgtatgtttggttgttggataattcggcattatgatgtgctttttcaaaatattccatagcataatcatttagttttcgatatagatacattagtcctatctctgaattgataagaaagcctaattgataatcatttgttttctctatttcagttgttgcttctagataaaatgacaatgcatcttcggcatgatgactttcatggcacaagatacctttataatatagtgccaatgcctttctttgtgcattatcttgattaatgaaataagaataagcgatatttattaaagaatcggattgttcaatttggtttttatattgagcttgtgtcatcaataatgcccatgtggcatattgttcattgttagaaggattgtcaggttgtatgccctgtaatatatgcagtgcgctgtcgggatatctgtacattattgcttctgcttttgccaattcgggttggaaggttgtggtgtagttcttattgtgtgtacaggatatcagactggtaattatgctaattattagccctgcatgtttgaagctgctcatagtaatcatttctatattattggtgataggaatcttataggatatgttgcgtaagtgaatgaatttgttgattttataggaaaagtttgaaggttgatattttttgatttatcctgccatgggataatataaaggaatgtgtctgaattatttgaaatatagaattaaaaaaatcagacatatcccttcattacagttgaggtaaccctttgaattgccggtataccattttaaaagtagttaaaatcctaactttaattttacaaactgtttgatgaattgtactgttccgtcaatccccaatacggacgaatcaatacataagtgataagtttcggcagctccccacgttttgtaactataataattatagtaagctgaccgttttttatctgctttttccatcaattcctcagcggcttctgtagaaatatgatggatatgcatcaatctttctatgcgtgcttctttggaggcagaaacgaatatattgacgcaacggggatggtcacgcaaaatgtagtcggcacatcggccgacaaacagacacgattgtttttctgccagttcacgtattacatcgctttgtattttgaacaaagcgtcattgctcagacaactgccatagggaatggctccgtcgctgataaaaggaaaacgtgttccgaatagaccgccgatgatgctttgagaagctttttcatctgctttttcaaagaattccttgcacaggccgctctcttctgaagctagcttgattaattctttatcgtaaaaggcgataccaaactcttgagccagtttttcgcctatctcttttcctccgctgcctagttggcgtcctaggttgataacataatgctcgttcatagtcgttgtctattgattatgtggacaaatataaggaaactaatttttaattcttaattttcaacttttaatttgttaccgtgggtattaaaaatcttgaactggcggtaaagcatgactcctgcgacaatacttgccgccaagtctgatattggcatactccaccaaattcctgccgatccccagaaaagagggagcaggatgatgcaggggagcaagaataataactgccgggttaatgataggaagatggctttaccagccatgccgatactttgaaaaaaattggacgttaccatctgaaacccgataatgggaaaaaatatgaccacaatgcgtaaaccggtagctgatagctgtatcagtccctcatgagtggtaaaagcggatacggccaattcgggcatcagttcacctactagaaaaccggttgttgtaacggtggtggcaccataaatggtaagttttaatacttggtttacacgatgatattgttgggcgccaaaattataaccggctatgggttgcataccttgattcagccccatcacgatcatgacgaataggaaaacaatccggtttacaataccaaatgcgccaatggccagatcgccatcatattctttcaaacctttgttaatgaaaattacaatgaagcatgctgccagattcatcaggaacggagacataccgatagcgatggtgttttttacaattgtaccgcgcagtttgtaaatgcctcggtggagatggagcaattcgttcttgtttgtgaaggttttgaattgccacaccagtgcgatgatttgagccagaatggtggcaatggcagctccctgaataccccaatggaatagatagataaaaatagggtcaaggatggtattgataattactgtggtgatggtggctatcattgctttttgtggatgccccgaagcgcgtagtaaggcattcagtcccaaatacatatgggttataacattgcccagcaggataatgaccatgtagtctcgtgcataggagatggtatccgggcttgctccgaagaagtagaggataggatcgaggaaaagcaaggttaatatactgaatcctatacctataataaagttcagcgtaactacattgcccaaaatattttgggcggtggcataatctttctgtcctaattttacggaaactaatgtggaggcacccacaccgaccaatgaaccgaatgcagccgccagattcatcagtgggaaggtaatagccagtcctgaaatagccaaaggacctacaccgtgaccgatgaagatgctgtctaccatattgtatagggaagatgccgtcatagcgataatggcgggaattgcatattgtaaaagtaattttccgattggttgtgttcccaattctgtgggggttcctgtttttgccatactttattttctgtctttttacctgtttaaactgaatttggctgcaaaggtacacaaaaaatgagtgtgagggaaaagtttgtttatctttgcatctaaaaaataaacggaatagaattaatgaatagtcaaaaaggaatagtgggctgcttgctattggcatgcaccttacaaatgccggcacaagtaaaaacgtataagtatcgtgtaaactttcgcgataaggcagaaacaacctatacattggacaatccttcggcttatttgtccgaacgtgctttggagcgtcgcatgaggcagagattgcccgttgattctacagatcttcctgtatgtcagagctatatagatatgctggtcggaaaaggagtatgtcctgtatccaaaagtaagtggaacaatacagtggtggtgcaggtatccgacacatcggttattgataaagtggcggcattgccttttgtggcagctgtccggaaagtgtggacagctcccgacagtatccctgcccgcaatgccgaccgtaaaaaagaggtgaccaataaggtgacaaagagtaataactattatggggatgcgtggcggcagattgctgttcatcatggggacagtcttcacgctgcaggttttcgtgggaaggggatgcaaatagcggtcattgatgccggtttttataatgctgatgagatcagtgttttcaagggaatggacttgttgggaacacgcgattttgtaaattctcactcggatatttatgccgagaactatcacggcatgaaagtgttatcttgtatggctgccaataagccgaatgtattggtcggcacagctcctgaagcttcgtattggcttctccgtagtgaggatgatgatacggaacagccagtggaagaggattattgggcggaagctttggaatttgccgatagtgtgggagtggatgtggttaatacttcattgggatattatgagtttgatgatacgaccatgaattaccggtaccgtgatttggacgggcattattcattgatgtctcattccgcttctttggctgccgataaaggattggtgttggtatgcagtgccggaaattcggggcgtggcacatggaaaaaaatcacacctccgggagatgcggaaaatgttattacagtgggggcggcggaccggaatctggttaatgctgatttctcttctgtaggaaatactacagatggccgtgtaaaaccggatgtgatggcggtgggagttgcttcggccgtagcgggtaatgatggaacggtttctcatgccaatggtacttctttcgcatcgcctacattgtgcgggttggtagcctgtttctggcaggcttgtccctggcttactgccaagcaggtggtggaggcagtgcggaatgcaggagaccgtaaagagtatccggataatatttacggttatggtgtgcctgatatctggaaagcttgtcaaatagaattggagaagaaaaaataatggaagaacatcctctttctttatatgaactgaatgcgttggttaagcgcagcattcatgcttgtctgcccgatacttattgggttcaggcagagctgagtgatgtacgttccaattattccggtcattgctatttggaatttgtacagaaagagccacgggggaataatctgatagctaaggcaagggggactatttggagcaatgtctaccgtctgctgaagccttattttgaagaggaaaccgggcaggcttttgttgcaggtattaaagtgatggtgaaagtggctgtggagtttcatgaattgtatggttactcgcttactgtgcaggatatagatcctacttatacattgggggatatggcgcgtcgccgtcgcgaaatcttgaagcaattggaagaagaaggtgtgctgactttgaataaggaactagagattcctttgctggcgcaacgcatagccgttatttcctcggctacggctgccggttatggtgatttttgtaatcaactggaacagaatccctacggttttgttttttatccgcatttgtttcctgctattatgcagggggaacgggtagaacaatctgtcattactgcattggatgctatccatgcctgtcgtgatgattgggatgtcgtggttattatccgtggcggaggcgccacgtccgacctttcggggttcgatacatatgagttggctgctaattgtgcccagtttcctatacctattataaccggtatagggcatgagcgtgacgatacggtgttggactttgtttctcatactcgtgtcaagacacctactgctgctgccgagtatcttataaatcatttgcacgacactgccaaggttcttgaagattatgcatcggctgtacttcatactatctctacccgtatggaacgggaaaatactcggctgaaccggatggtagaacgtattcccatgcagacgcggatgaggctgaaagaggaacattatcgccaggaacgaatcatgaagcatttggaagtaggcctgcaatcccgtctgacaaaagagacccattgtttgaaaatggtggagactcagttgggcatcgtttcacagcgtcatctggtaaaggaaaagcatcggctccaacttttggagcaggaattgaaggcggcatctcccgaaaatttgttgaaaaggggatatagtatcacgctgaaaaatggcaaagcggtgatcgatgcttctgcattgcagccgggggatgaacttaccacccgttttgccaaaggagaaataaagagtatagtaactaaaaaataaaacgaagtatggcagcaaagaaacaaacctatgagcaggcaatgaaacgtctggaagaaatcgtatcacgcatagatagtaatgagttggatatagacagtttaagtgtaaatctgaaagaggcacaagagttaattaagttttgccgggataaactttataaagccgatgaggagataaagaaaatgttagataataatgtatcaatgtgacaatatgctaatgtggcaattggctgcgttatattccgcatggcatatttgcacattagcacattgagacatataggcaaattataaaagctataaataaaaaagctattttggttggaatttgcaaatataaaacgtaattttgctctcattcgtaaataataacataattaagatacactatgaaagagattgattgggcaaatctgtccttcggctatatgaagacagactataatgtacgttgctactatcgtgatggtgcatggggagagttggaactttgttcggaggaaacattgaatattcacatggctgccacttgtctacactatggacaagaagcgtttgaagggttgaaagcttatcgtggaaaagacggtaaaattcgtattttccgtcctgaagccaacgcggagcgtttgcaaagtacttgtgacggtatcctgatgccggaacttcctacagaaaagtttgtggccgctataaagaaggtggtgaaagccaacgagcgtttcattcctccatacgaaagtggtgcggctctttatattcgtccgttactgattggtacaggtgctcaggtgggggttcaccctgccaatgaatatctgtttgtggtattcgtaactccggtaggtccttatttcaaaggtggtttttctactaatccttatgttattatccgtgagttcgaccgtgccgcgccttatggaaccggacgctttaaggtgggcggtaactatgctgccagcctgcgtgccaataagaaagcccatgatttgggatattcgtgcgaattctatctagacgccaaagaaaagaagtacattgacgagtgtggtgcggctaatttcttcggcattaaaaataatacttacattacaccaaaatcatcttctattctgccttctataacgaataagagtttgatgcagctggccgaggatttgggtataaaggtggaatgtcgtccggttcctgaagaagaactggaaaccttcgaggaagcaggggcttgcggtacggcggctgttatcagtcctatccagcgtattgatgatttggaaaacaagaaatcgtacattatctctaaagatggaaagccgggtcctgtttgtacaaaactgtataacaaactgcgtgctatccagtatggtgatgaacctgatacacataattgggtgacagttttagactaatagaaaaatagattcttatgaaaacaaattcagaattgaagaatcgggcaatcgatgcgttgaccggtaattggggattgggtgcggttattaccttggtttatggactggtgatgaatacccctacgctgccctatcgtattatggagtcggtggcttcgtcctcctttagtctcattgctttgttgctcctacccttgggattcggctatactatcctttttttggatgtgattcgtggaataaagctggattttgcccgtcttttcgacgggtttaaagactacggacggatattgggtacaatgctactgactacagtctatacattcctgtggacgttgctgcttgtcattccgggcatcatgaagtcctattcatatgccatgacgctctttattctgaaagattatccggagttgcagtacaatgctgccatagagaaaagtatggcgatgatgtccggtcataagatgaagatgttcttgttggatttgagcttcattggttgggctattttgtgctgttttactttgggtatcggtttcttgttcttggctccctatgtagaagcatcacatgctgccttctatgaagatttgaagaaagaattgggagagtccgttgaggcaatttctgaataatatagaaaatagaaagagaagaaaaatagacctgcaagtgaattgcaggtctattttttttctctttcacaggatattcctacctttgcctgtggaaacaaataatgatagactaattttcatgggaaaaggaaaactggagaaatttgctgatatgcgggagtatccgcacgtgtttgaatacccttattcggtggccgataacgttacgttcgatatgaaggggaattggaaccgtgacttttttaagaacgataatccgatagttctggaactgggatgtggacgaggtgaatataccgtagggctgggaggtatgtattccgataaaaactttatcggtgtagatataaaaggggcccgtatgtggaccggtgcgacggaagcgctgaaaaatggcatgaagaatgtggcttttttgcgtaccaatatcgaaatcatcgatcgtttttttgctccgagcgaggtgagtgagatatggctgactttctctgatccacagatgaagaaagtgactaaacgtcttacttccacatactttatggaacgttatcgcaagtttttgaagccggatgggctaattcacttgaagaccgacagtaattttatgtttacttacacccgctatatggtagaggaaaacaaattgccggtagagtttatgaccgaagatttgtatcattccggtttggtggatgacatactaggcatccgtacctattatgaacaacaatggttggatcgtggtttgaatataaaatatatgaagttccgtctgccgcatgagaaggagttgcatgaacccgatgtggaaatagaattggatgagtatcgcagttacaaccgcagtaaacgaagcgggttgaaaacaagtaaataataacagaatgatgactttatatccgaaattgattttggacgctttggcaacagtgcgttatcctggaacgggaaagaatttggtggaagcggagatggttgccgataatcttcgcattgacggcatgtcggtaagcttttcgttgatttttgagaaaccgaccgatccgtttatgaaatctatgataaaggctgtcgaaacagctattcatacttatgtttcacctgatgtacaggtaactattgcgacagagagccgccaagcggcgcgtcccgaaccgggcaagctactcccgtttgttaaaaatgtgattgctgtttcatccggaaagggtggggtaggaaagtctactgtggcggctaatctggcagtggctctggctaaattgggctataaagtggggttgttggatgctgatattttcggtccttctgtacctaaaatgtttcaagtggaagatgctcgtccctatgccgaacagattgatggtcgtgatttgattattccgattgaaaaatatggtatcaaattgctttccattggtttctttgttgatcctgatcaagcaactttatggcgtggtggtatggctagtaatgcattgaagcaattaatcggagatgcggactggggcgagttggattattttattcttgatactcctccgggtactagtgatattcatcttactttggtgcagactttggctattacaggagctgttattgtcagcaccccccaacaggtagctttggctgatgcacgcaaaggaatcaatatgtacaccaatgacaaagtaaatgtacctattttgggactggtggagaatatgtcatggtttactcctgccgaacttcctgaaaataaatattttatctttggaaaagaaggagccaagcaattggcggaagaaatgaatgtgcctttgttgggacaaatccctattgtacagagtatttgtgagaatggtgataagggtactcccgctgctttgaatgagaacagcattaccggacgtgcattcatagagttggctgaaaatgttgtgaagcagactgagaagcgtaatgcggagcaagcgccgacgcacattgtggaaatgaagaaataatttgaaatatgtttttgggatgaaaagaggctgttcgaaacagcctcttttctgtttttatactctttattgcagtttgaaagttacaggaacagtatatctgcaacgtactgttttgtcttttacagttgccggcttccatttcggcatggattttacaactcgtgctgcttcagcatctagttcggggctaatgctgcgtacaatgcttacatgatctaccgaaccatctttttcaataaccatctgtacgattactttaccttgcgttccctccttttgagctgttgtgggatattttatgtttcgtgccaaatgttgtaagcaagctgccatacctccggggaattcaggcatattgtctgctatctggtatacgggatcttctccgacaagaagtaatcttactagttccggattttccatatctttgatgggacagagttcttttaccgtgaattttccttcctgataacctttatggttaatggcaatggtttcgcctactcctactgttaactgagcttctccatgagcgtttgtcgtggctttggcatttgttgaagaagaaataagttctgctcctgccagttgttggttatcattattagatatttgtaacttgacccgtatttgtttgccggctttgatgtaagcggcaatatcatcatcagtatcaaagatggcagtaacatttggtttgtttgctgaaagtagaagtgattgatgtttggaacttttaggagaggaaacgtctagggaaacatacttgggagtcgttatatccacttctatggtagcttttccttctgcattggttttgaaagttttcacttcatcactcggtttgatttgcagagtaacattaggttgaggcttaccttcactattggttacggtaatagtgaaagtcactagaccttgtactgtgttgacaaaagatgccacttcttccctttcggggcgtggggtgctttcttccgtggaatagattaacctttcggctgtccgtgccacggtttcaatgttgctgaccaagagtagagcagcagtcagcggtgcaaacaaggcatatttgatatgccctgtggtgcgggttctttttttgttcatcattttaattctgttttttaagtgtgataagttgaaattattatataaaccggtttgtctgttctggttggctaatcccaaaaggtgatattgatatgctttcttatttgtgccggattccattactttatgatcggcaaggtattctagattgagtctgatctctgttttcattagccatgcaaaaggattcatccagcaaatgatatttactatttcactgataatgacatctatggaatgccattggcggacgtgggtctgttcgtgcgtcaggatttcttgtttttcatcttctttcagttcgggcagatagatgaaaatccattgccagaaagagaatggattggcaggttctgatagactgcgtatgaatatttggtctacatttatactcttgctttttaagacaaggtggaaaatactacttagttggatcataaatcgtgcggataataaaaggattccaatccaatagatgaactttattatatcaagcaggccgggtgtgggaatagcaacaggagttgtgactactgtggcagtggaagtatttgtttctgttagcatcatcagtgtgtagtaatctgccagttcattgatggcaggttgttctttcacccatgcttgcatatccattagcggataaagaaaagagagtgcaagaaaactcagcagtgcgatacgacgccattggaagaaagtgtcgcgacagcagaacagcttatagaaagcatagaataaggcgatgcctatatttactttcagcatgtaaatgagttcgggagctgtagttatcataatatttatgaatttagcaaggttatttatcttcttctttttctatcaggtcaataatgtctttcaagtcggttgcggagattttttgctctttagcgaagaaagataccatttccttatacgagtcggcaaaatagtttcggaccacaccacttacaaatgtgcgtttgtattcactttgtttcactacaggggtgtattgataggtgttaccgaagcgcttggctgtaacataaccttttcttttcaggttggtcactatagacgctaccgtagtgtaaggtggtttaggttcgggaaatttagcaactatgtctttcacgaaacattctcccatgctccaaatatgaagcatcacttcttcttcttgtatcgttagcttttccataagaaaatgaattgattacgatgttttcgcaaatttacgaaattttcgtaataaacaaaaggaacggaagttaattagtgtgaatatagattgtggacaaataaaagaacaaagtgaagaatccagctgtgatagattgaagcggactcttcactttggcatgaaaatgacagatgaagtaaagtttattttttgtgtaggatataatggtctgctaactctcctgttattgcctgtttgtcttgattgagagcggtcaaggtattctcaccgactttataatattgcttatcctctccattaattaaagtcataatattaccttcaacggagtaagttccatattctttgaaagtagcatcctgccggtcaatgtattctgatatcaactcaaaagtcttgtcttttttaatagtcagggtcatgttgatacccggacagtcggcagctggaaaggttccggtgtaagtaccgtcataatccaatgaattttctgcattgtgcatatccgttgtttcggtggaggttgcagaatcgttagtgtttttggggttactgttacatgaagtaatcagtaggcatacgcatgccagaataaaaagttttttcatcctaaataattcatttggtttttaatttataaacaaattcagacgatatttgttttgcgtcttttcttaatctcttttaatctttcgtatacatgtctgcggcttaaggtgatctgacgacggtatacgatgcaggtggtaaggaaataaacgcctgtttgtatccacaatatccggtactctgtcagtacatcggtcagtgtggcacccatattgttaatgcgtacaaaaccgttgatgccgaaagtggaagggaacagccatgaaatcacctcccagaatttaggaatggcagtacctggccacgagatacctgagataaatagtaacggcactgaggtaaatacgtagatcatcatacaggcttcccgatggtgaataaagatagaacaagtcatcgcgaaaaaaatgcatgccagtatgtaaggaaacatgaatgccgctagggttccggcttgagctatttgtaccaggctgaacattttgggaacaaggcagagcatataggtagccatgacagcatatatcataaggtaagtcagtgatttgcctaaaacaatgcgcagcgtgccatgataatggcggctcatggggataaggtctcgaaaacggttgttctcacgagcagttccggcagatagacctactcctagcagtaaagtttgttggataatcaatatcagtacggcgggtatcaggaagctggcaaaaccgttctgcggattgaaaatggaaatatcctcatacgctatgggagacgtgctcacttcatcttgtcggatggttgtgttgccggagcgttctatctttatctgtttgttcatcatcagcgaggcattggtgttggctgtcagcatggctttgtagtatagcataccgctcatgtcacagtagatggtaacatgggtttgaactcctttagtaatgtcgcggctgaagctttcaggaatatagatgatgccatacactttgccgtttttcaataaagtttttgcttcttccatatcactgcaatgagatactatttccaagtcggcacctgcatctaccagacgcaggtattcacggctgaggctggaacggttattatctactacagcagcaggaacttcacgcactgtttcattggtatatataaaggtatagagaagcggatagcctagtggtaccagaatgaagaagataagtacaccctgatccttcacaactgctttcagctcttgccaccagatgtagaaaaggtctttagttccttgtgagatgatatctttgagtttatatgctctcataactgcttgccgttttagggaatatatacataatgtaatagtactgtgcgcagtcttttcagtataaagaaaggcaacagcatgaataacatcaacgcgactattgaatgccatgcgtaaatcagcggatatccgttaagcgccaaatctacataaatcaggaagtagtggcgtaacgggaatagattggccagtgcctgtaacacaggattcattgccataactggaaaactcatacccgatatggagaaagaaatcactccccatagggaggcagtgctcagtgccaagcggactgttgtaaacaatccgaacagaaatactccgaaagcctgtgaagccagtactaataacagaccggcaaacagcatgggcagtataccgctattacagggatagtgcaggaaaccgtatagataaacattatagaaggtgcccatgacaaagaaaactaaagtctgaggcagcaatttgccggtcagagctacggtgatggaattgcctgccatgcccatccattctttttgggtgttggttttcatttcacttccaatggtatagacggtggtcataaagataagcagcatcagaatacctggtatgatagtgttactcaaatatactgaatagttgagccatgggttgtttaatacatgggagtcgatgactatgggctgcaggaacgccatggcttggtcttctgtagctcctttggcatataaggtggcacggccgatggctccacccgccagctcggacatggtgcgctggtctttatagagtaatgaaccagctaccagataggaatagttggtataaaaagaaaccttgggttggcggcttgctaatgccttgtcggtagttccttttggaatatagtagaaagcatagattttcccttgctgcatggctttgcgggcatctgcgaaactggggtaatgcgctatgattttagtctgctgaaaagcgtccagattacggatgatgctgcgtgtggtagctgtgttgtccaaatcgaccacacctgccggcatatccgtagggagtccgttccacattaatgtagtaaagaagaggtaacagaacaagggagctatgatcatgcagaacagatatagcggtcttgtggcgatgcggaacacttcacgccgggctatgcggaatatacggttatggacagtattgttcattgtttgttatttctcgatgatggcactcattcccggacgcaatccgtctgttctctctacaggaacagcttttacctcgaaggtcttcaggtcgaattgccccgtagtcttggttgctttccaggcggcatatgtacccagatctttcatataagtaatcttgaattttatttctttgtcaaaggcaggaataaatgcgttaatctcatttcctacggtaaagtcttttaggaaatcttcgcgtacattgaatgttacccacatgtcattcaagcgggccacgttcataatgggggcaccggtacctaccagttcgcctgctttgggaaagatttcggtcacttctccatcagcagacgcggtcagtatcgtttcgtctatgtaggaagaaacttcggctacagcacctttggcacgttctacttgggctgcggctgcggctttgtcttcacgttgtgcaccgttctttgccatttcgtattgggagcgtgcagctttttctgtagcactcatggcatcaaattgtgctttggcttcatcacgtttttgcgcggacattacgccttcttcaaagagtcggttgacacgattgtatgatttttcagcaatttctactccggctttagctttctgccatatttcgtaggcagcttgcagttgctcttggcgggtacctcgttgtgctttttcattcaaggcttgtgctgcttgttcggcagcttgtgcttgagaaagtttggcttttacatcgggggcttcaaggatagccagtgtgtcaccggcttttactttgtctccttctttcacacgaaattccagaatgcgtcccggtactttgctggaaacccgatattcgtcagcttctgcttgtccctgaatgatttccgggccttttcccaatgtgaagaaacctatcagcgatacaataacgatgactgctgtcagtgaaataaatgccagcaaaatattgctgtgttgtgatctttctgccatatcttttcgtttttaatctttaatttttatttaagcactcccattgacttgcgcaaatagacttcagtcagttttacatcaatctgagcgtctattttgtctgattgggcagataaccaagcggtttgcgcttccaatacattactggtgggaatgactccttccatgaatcccagtttggcatagcgcagattctcgtctgctttttccagatttttttcggccatgctcaggcgtttggctgcttcatttactttatagctggcttggcttacctgcaattctaccttttcttttgcatctgccagttgatagcgggcaatgtttgcttccgctttggcagcttttaccttatacattccttcgccccagttccatattggaatttgtaccatagcgccaacagcccacatgccacggaatttgcgttcaaagccgtttaccaatgagggattggttaccatgtagttggcggtcagagccactgtaggaagaaatcccgcgcgggtgatattgactttttggtcataaattttattagctagatccaaacttcgtaattcttcgcgatttgccaaagcggtggctacattatcacctacatgatattcagggagagttaagctttctacgtcttcatctgctaaacgtatttcatcatttaaaggcagaccgcataattggcatagtaccattttagataggcttaatccgttgtctacttgtgtgagcttcatttcggcttcattcacttttacttttacacttagtccgtcggctttggtggcgacaccttcggttatcattttatctacatcactgtccagttggctgaccagttgcagatagctctgggctagttttttcttgtttatcagtgagatgacttgccagtaagcttggtctgtattcaaaatgatatcctgcataccggtggcgtgctgtgattcggccagctgttctgcgtattgggtgattttattgtaggcaacaatttttcctcccatgaagatgggttgggtaagggttacagctcctgcatacatattgcgtgtgtcggtgcgcagcgcatctaccaaaccttgtccgaccttgttcagtgcatttccaatacctgggatgaggggagcaagtggttgcagtatttgtgcgagttcgggattggaagctgccagttgttggaaagtttcctgtatagagccttgggcggtagtccctatctgactgataactcccttttgttcgtcacttaataaagagatttctttctgagtgcgcatatacgttcctatagctgcaatcttaggaagataattggtaaaagccgctttcttttcataatgtgcagctgtaatcttttcagctgaaatgcgcaactctttattgttggataatgctaaagcacgacaactatctaaggtgagtgtgctttgggctgaaatactatctaaaacaccgataaataggataaaagctgcaatctttttcattatagtgttcttgttttgttgtttttaagttgtttatgcaacaaaaataagacaaatctttaagaaagccatattctagatgttattttaaaatatttttataattctgcaatctgtatgttcactgcttttgtttgtgtggagaaaaaacagccggttcgttttcaaccggctgatttttttaattaaatatatttgggggagaatgttccttgttatttcatgctgaaagcttgttgtcctatcatggttccatcagcgaagatataaacatgataagttccggcaggcaaatattcttctacatcccaatatacggttacattttgttcttctccggtgtattctatgtatttcttgatggaataaaccaaactacggttttcgtatgggaatgtgtttgaagggtttttggttagtatgtcattgtccggtttggcaatacgtatatataaagtacgttcacctgttttggcagtaatattcttgacaatggtgaacgagatagctatcttttttacatcttttaccttcttggctgttttaccgcgtttgtttctaggctctacactaattgctgtggcatccaattgagctgccaaggtgaccttttcattcagattttttttctcttgagataaattattgatttggcgggttgcctgcgtatatttttgtttcacttcttgattttcttcagctagtgcttggttgagtttgttcagtgaatctatttggataacataggtgcgtagtacggcacgcactgttttcagttctttcttcaaacgcatgatttcagctgcattactggtctttacttgtcgtaattcttctagcagccgctgtgttttcagcttctcactctccagcttttcgcgcaaggaatcattgtttatctgtatctgaagttcatcatattgggtggcgaaagttgtatattcgttttccatttccagtttttccacagcgaagagttcgctcatttctttattttcttttgcttgatgaaaagcataaaaagaaactccgccgataatcacaaccagcagaataatgacaataatcagttttttgctcttatccatagtgttacattgaattttggacaaaagtacaataatttatgtagactgctcgaaaaatattatggaaatttttctttaattcggaatatcattgtaactttgcggtgcttttaagaaggcgattttattatcaactttaaacaaaatatagagattatgtcaaaagtaaccgtagtaggcgcaggtaacgtaggtgctacatgtgcaaatgttcttgcttttaacgaagtagcagacgaagtagtaatgctggacgttaaagaaggcgtatcagaaggtaaggcaatggatatgatgcagactgctcagttgttgggcttcgacacaaacattgtaggttgcactaacgattatgaaaaaacagctaactctgacgttgtggttatcacttcaggtattccccgtaagccgggtatgacccgtgaagaactgattggtgttaatgcaggcatcgttaagtcagttgctcagaatatcttaaagtattctcctaatgctatcatcgtagttatctctaacccgatggataccatgacttatttgtcattgaaagctttgggcttgcctaagaatagaatcatcggtatgggtggtgctttggatagttcacgtttcaaatatttcttgtctcaagctttgggttgcaacgctaatgaagtggaaggtatggttatcggtggtcacggtgatactactatgattcctttgactcgttttgctacttacaaaggtatgcctgtttctaacttcttgtctgaagaaaaattgcaggaagttgcttctgctactatggtaggcggtgctactttgactaagttgctgggtacttctgcatggtatgctccgggtgcagctggtgcatttgttgttgaatctattatccacaaccaaggtaagatggttccttgttcagtttatttggaaggtgaatatggggaatcagatatttgctgtggtgtgcctgtaatcttgggtaagaacggtattgaaaagatcgttgaattgcctttgaacgaagaagaaaaagctaaatttgctgcaagtgctgctgctgttcgcaagactaatgctgctttgcatgaagtaggtgctctttaataagaacaaactataattttatatgaaagccgttttttctgtgaaatgagaaagcggcttttaatttgtatagaatctttgaaaaagtaagtgaacttcgtgagcaaagtaagtgggcttaaatggcaaagcaagtggacttacttgtctcgcgaagttcacttacttttttgtgtttctgaaatgaaaacggcaggaagattttctcctccatcagtccatcgggtaaagaggtagccgggataaagggtaggagcggtttcatttatccattggttgagaagctggtagataggaatgttttccttattcataaaagtacctgtgtattgggcatttttagacaactgattcccactgtcattttttccgataaaggttatttttgcattatcatagtagttgtggatgaagaaagagttggcagctatacctgcaaataatcctttggtcgtaattagatctatgttatagacataacaattttcaatgtgcgctccatctaaagcctttccgcatattccaccattgtaactttctctgttctttattatgttgttggcagagtagcagtttgttatcaaaccttgagtttggatggaacctgctattccgccggctggttctgcttttatttttgaatctgcgtcataaacgatttgggtgttggtaacatagcaattggtgatttcccctgttgaagttcctgctatgcctcctgtattggctgattggttcgttttggttggattggctgtaatttggcactctttaacgaaacaatttagtattttgcctttattgcgtccgactaaaatgcttgtaccttctgctgtgctcttgctttttgatgtgatagatactttgctggattcgatatgaagatttttaactatgccggtgatattgacagctccgaatacacctgtggtgccattgctggaattgataggtatattgtaaagggtgtgattttgtccgtcaaagatttgggaaaagtaatagtttgtttgggcatatcctatttgctttaactcagtacaatccacatctttaaaatcaatgtcattcaataaataataaatggttattccattcatcgtttctccgaaatcgtccaatgtttttcctttgtattgggtaaatgtattgctattaataagttggctgaacgcaatccaatcttcggcagtaataattcccggagttttttcagatgtctttaagtgataagtatattctttgttaccagtaaaagactttgtttctagttgtgttgtatatttctttccattcgtcaccatatttatggcgatgaccatgtttttgacaggagggactataaacgaataatttccggaaggagaaacttgggcaatagtagtcgtatgtgtttcattatccgctggaactatttcagcggattttgggataatagaagaaacagcaggacatgttatttctattttctgaagattggtctgtaaatctctgtccaaatacagtgtcagaagagaaaataaatgtttgaactgtaaatggatggaatttccggctggaaattcatccttgacatacagtatgtcttccaacgaattgtttttataaagattttcttggatatagtccaaatcaggatagacaggatatagcgccgtaatatttgtttttcctgttatgtcactccagctaaattcattttctgctttccattggttgtccatataagtcagaattctgttgtctatttgaagactgccggaagcattcagcaggatttgattgccggagttaaaagtggaaacaggggagctttctgtgaaagctgctttgtatgtattgcctgtgagtactacctcgatatcggcccctgtataaacaagattgtcggtgcagctttgcaaagccaggaccgacaatcctattattaatgagttatatttcaactgaataatgtattaatgaaaattgctttatggttcaggtattgtgaattccctgtcagcaaagagttccattaagccggatatctgtttgagtcgtaaaagttcgtcggcatccataccaatattcttttttatccattcgtcactcattccggctttggtcagttctgccacgatatctaccatcaattcaatgctgtgagtgccgcgggcgcggttgtggcggatagtgcttgccattctgtttgaaaggtctttttctataacgaccacgggaagtaaacctttttctcgttcgaacacacgttttgaagttttaagcacacaataacgatgatacccgtctaccagttcatatatatcttcatcgggaatataataacatacacaaggcatagtatagccatcttcccaaatgcttaattccagcaacttcatttcaggagcagctacgtggtttggattataactgttggcacgtaccttttccaccggtactctgtgcacgtgatacacaggactttcgaattcttctttcatctgataatgtttttatatttctgcatcactctgtctcttcttaacttttcttttttagttagggcaaatcccatatatttacatacatggtcatttttcagaatgcaaatacacatacgtttataagtggggatttctttgaactctgcgatgtctatatcgtctagataatccatttgaacaggaagtttgtctgtcttgtagtttgttttcttttgtacgtagaattttatgcccaaatcagttaacttgcgtatagttgataaatctaggcatcctcccttgtatttccagaattcccggcttactcttagtttttccaaataagactgtttggtttcttcgggtaacgtatctaacaggaagtacatatactctttccatgtgtagccttctggtaatttgatgttttgccatcccatggcacgggttccaccatagattccggtaaagtttactccgtttactcggcctaacattctcccccaagtattgggatcgatggctttgtacaatttcaaggtttcctgtgctgtgctgaggaacggactggctacacgttgtctgtccaaaggtactccggctttataataaagctcgtacatttggttgaatggccatttgaaacgggcgtatgctgtccatatatcttcggtagtccagtcatagatagggtaggcattgtataaatcgtatcctagtctgcgggtccacatcaggttgtgatagctgttcagacgattgttaccatgaatagttctccatcggtctaggctctcttgagttcggatgccaaccaggcagcaagtgcgtactgcatcatgctttttatggtaccacgaggcgaatgaagtttggaaggtgtagtcccacatttcctcattgtagaatgggaaatcttctttcttataacagtttttaggcataggccttacccagtgggcgtgcatgctttcgtcccaagggcgccaataagtttggaacatagaagcacaagtcactactttgaaagggacacagacatggtagatttccaatatatcctgattttctctgaacgtttgttccacatactctgtggtcatttgatactgtgcttcatagtccatgtggtatactccgattttcctgtccagattatgctctctgatatattggatacataaattgagcaagacaccactatcttttcctccagaaaaagaaacatagatattatcaaattcgttgaataagaatttgagcctcttttgaacgagttgataaacattttcccctttagttcttttattattcatttttgttcgtgttgtaaatcattttaatataattagtccagcggtgttcggtttgaaaaccacagttggaaaaaattgcttcgtgtttggtttgaacaattgcatacaaattgtttttaggctttactgcttccaacaatccagctaacacttcctgatcatcgttatggacatagtagttgttaataacataaccgccacttttctgctctacagggacaaaaccggttacgtcactatcttcgacagcaatgtaccattgaaaacgttcggtcgttttaaagggataattgttatttgccctcaggactttaggattcatagccaatggtccaattaaattaaataattgaggttcaaggccatctagttgtaatatttccataacttaaattttacatacgtttacttgaagctacaaatgtataaaaaagattggatataccataaaaaaacgctgccataccttcacaggcgggcagcgcaagctacaatacaaaatacaaatacaactaaacgagatatttttatgctaatagaatgcttttaaacaattccttgggccatcatggcatgagctactttcataaagcctgcaatatttgctccttttacatagttgatatatccatcaggttcagtaccatatttcacacattgttcatgaataccatacataatttgatgtaacttatcatctacttcttgtgcactccaactcatatgcatcgcattttgactcatttccaaacctgaggtagctacacctccggcatttacggctttacctggtgcatacattagtttgttttcaataaacgcatcaattgcttccggagtacaacccatattagaaatttctccaatgcaaagaacggaattttttattaaattacaagcatcttcgccatttaattcgttttgagttgcacacggaagtgcaatatctactttaacttcccacggacgacgtccggcaacgaatgttgagtttggatatttctctgcgtatggagctacgatatcattgcctgacgcacgtaattccaacatataatcaattttatcgccacttacaccgtccggatcataaatatagccgtcgggtccggagatcgtgactacttttgcgcctaattcagttgctttagtcacggcaccccaagctacattaccgaaaccggaaacagctaccgttttacctttaatatcaattccttttgctttcagcatttggtttacgaagtaaagaccaccaaaaccggttgcttcaggccgaattaacgaaccgccaaattccaagcctttaccagtgaaggtacctgtaaattcacgggttaactttttatacataccgaacatatatcctacttcacggccacctacaccgatgtcaccggcaggaacatccatatcaggacctacgtggcgccacaattcaagcatgaatgcttggcagaaacgcatgatctcagcatcgctcttaccacgtggtgagaaatcggagccacctttaccaccgcccataggcaatgtggtcagtgcatttttgaatgtttgctcaaatcctaagaatttcagaatggagaggtttacagaagcatggaaacggataccgcctttgtacggaccgattgcattattgaattgaacgcggtaacctaagtttacctgtacttttcctttatcatctacccaaggcaccttaaatgtaaagatacggtcgggttccaccaatctctcaatcaaggacgctttctcaaattccggatgttgattgtatatatcctcaatagaaagcaggacttcttttacagcctgcaagtactctgattcaccagggtgttttgcctccagggaggtcatgatttgattaatatccataattattatgcatttaaggttttgacaaaatgaaaatcatttctgatgcaaaggtatgttttttggtgaattggcaaaatattttgggctaaattttagtttggtggtgataaaaagttaatcgttgtggtaagaccactctacccaaaagttcttttttattgcgaataagttgcataaaacaatattattgacgtattttgctattacattatccatgtaaatcgaataaccatgctcagcaagttaaaattaaatcagttgtatttcaaggatacctcgtttgtaaacctcatgaccaaacggatttttaatgttcttttggtagcaaatccgtatgatgcttttatgttggaggatgacgggcgtatagatgagaagatatttaatgaatatatgaacctcagtcttcgctatccgccgcgttttacacaagtttctactgaggaggctgcctggaagcaattggagaatactacatttgatttggtgatttgtatgcccggatctgataacagtgatacatttgaaattgcacgcagcataaaagaacaataccctcatattccgctggtggtactgaccccgttctcgcatggtattacggcacgtatggagcatgaggatctgagcatttttgaatatgtgttttgctggttggggaatacggacctgttagtatctatcatcaagctgatagaagataagatgaatttggaacatgatattaaagaggtgggagtgcagatgattttattggtggaagattccatccggttctattcttccgtgttgcctaacttatataaatttgtgttgaagcaaagtcaggaatttgccacagaggctttgaatgctcaccagcgtacattgcgtatgcggggacgtcccaaaattgtattggcacgtacttacgaggaggcgatggatttatataataaatatcagaataatgtattaggtgtgattacggatgcacgttacccacgtggtggtgtggtggatccaatggcaggtattaaattgctggcggagatacgttccagggatccgtttgttcctcttattttacagtcggccgaggtagataacaaggtgtatgcttcccggtatggtgctagctttgtggataagaattccaagaagatgaatatagacttgcgtgaaattgtgtctgatgattttggtttcggggatttcattttccgtaatcccgatacattggaagaagtggcccgtgttcataatttgaaggaattacagaatgttatttttgctattcctaaagaatctcttctttaccatatcagtcgtaatcacgtatcccgctggctgtattctcgtgccatgtttccacctgccgagtttttaaagcagataacttgggattctttgcaggatattgatgctcatcgccgtataatctttgaggctattgtgaagtatcgtaagatgaagaatcaaggtgtggtggctgtgttccaacgtgatcgttttgaccgttattctaattttgcccgtatcggtgaggggtcattgggggggaaaggacgtggtttggcttttatagacaatatggtaaagcgtcacgtggaatttgatgagtttgaaaatgcgacggtagtcattcctaaaacggtggtgctttgtacagatatctttgatgaattcatggataccaacagcctatatcaagtagcattgagtgatgcggatgatgacacgatattgaaggcttttcttcgtgccaagttgcccgaccgtctggtggaagatttctttgctttctttgatgtggtgaaatcgcctatagccatccgttcctctagcttgcttgaagattctcattatcagccttttgctggaatatattctacttatatgattccttatttagatgataaatatgagatgctccgtatgttgagcgatgccataaaaggggtgtatgcttctgttttcttcagagacagcaaggcgtatatgcaggcaaccagcaatgtgatagaccaggagaagatggctgttattttgcaacaggtggtcggtacacagtatggtgaccgtttttatccttctatttcgggggtggcacgttcgctcaactactaccccataggagatgaaaaagccgaagagggaactgtgagtcttgctttggggctgggtaaatatattgtagacggagggctgactctgagggtgtgtccttatcatcctaaccaagtgttgcagaccagtgagatggaaattgctcttcgtgagacgcagactcagttttatgcgcttgatttgaagaatacggggcataacttttctttggatgacggttttaatttgttgaagcttccggtgaaagaagctgataatgatggagccttaactttcattgcttccacgtatgatccgtatgatatgattatccgtgacggaatttatccgggaggccggaaggtgataacatttgccaatgtgttgcaacatgatgtatttcctttgcctcgtattttgcaattggtacaggaatacgggcaaagtgagatgaggcgtcctgttgagatagagtttgctgtgacattgaaccagcaaaagaagaatggtactttctatttattgcagattcgtccgatggtcgatgtgaaagccaatcttgaggaggatttgaaccttattaaggataaggatgttcttttaaagagtaataattcactgggacatggcattatggaggacattcaggatgtgatttatgtgaaaacagatggttatactgcttccaataatccgaccattgcttatgaaatagaaaagatgaaccgtaaattcttggatgaagggaaacattatatattggtaggtccgggacgctggggaagcagcgattcgtggctgggcattcctgtgaaatggccccatatttcggccgcacgtgtcattgtggaggcggggctgactaattatcgtgtggatcctagtcagggaactcacttctttcagaatctgacttccttcggagtcggttatttcacaatcaatgcctatatgaaggatggtatctataaccaagaggtactggatacccggccggctattgaagaaaccaggttcattcgtcatgtacggtttgataaaccattgatagtgaagatggatggaaagaagaagctgggggtagtgatgttgccggaataatgttctaaattacgtaaaatgtgtcctaattttcgataaaaatagttatacgcttaactttttattatatttgcacgatttttcgagtataaattaaattaactaaacaatgaaaaagaatttgttttattacctgtttgcaatgatctgctcagtggcattgttcgcatcttgtagcgatgatgacgatgaggtaacaggattgactattgatcaggtggtgggtactttcactggccaattggaagtgttgaatcaatcaattcctggcacttctatctttgtaactaaggtagatgccaatacagtgaaagtggaattgaaagattttaaattcagtggattgacaattggtgacattagtgcagagtgcaaagttgctttggatagagaaggggatgattttgacctgaatggacaggctactttgactgtggcagctttggggaacattgaattgcctatttctattacaggtgaggtggatgccaaagaactggatattgatatcaatatcaccaatgtaccggcacttaacacgttgaaagtggaatttgaaggaactaaataatcgggttaaggaaaaataaaaaaaaggtaggagcttgcaaggaaaggtttctgccttttgtttgttgatgacaaatactatttaaagaataattagacaatgaaaaaaaatttattttattacctgtttacagtgatttgttcggtgacattgtttgcatcgtgtagtgatgatgatgaaaaagtggtaaatcctgtgcctcagacaacttttactggtgaaaacggtttgcaacttacatataatggtgcgccgatgctgggtaagaaagttacttttactcccgatgcaaccaatgctcagaaggcaactctacgtttggaaggggaatttgacttaaatggcatcttggggaaagcaaagagtgctgcagctcgtgaagaggtatcgatgcctactgctcccggtgtgttaccaggaagtccggtggttaccttgccggttgatttgactatcaatggtgatcaatgttcttttgccggtacatcagaaacagattattgtactttctcttataaaggtgaggtttcagccggagctatggagctggctttgagtgaagtgaaattgaagaatgcgaaactggctggaatgacttggaagttgaaaccgtataaccaggaagtagaagagcaggatcctgttcgtctggtatgggagtcagaaaaaggaattcctcttttcggttcttttgaaataccggttgagtcggttttgaaaatcgcattacgcatgccgctgattgctgttggagcagagaataaagtttccgctactgatatgttgggaacagttttgcagaatgtcactttcatggaagacggtaacatcgtggctacttataaagatgctgctaatggtggtacagaatggacgaagtctcctgtaaacttggctcaatacgtagtagagaatgacaatcagataaaggtgtttctgaatcctgctgctatcatcgctgctgtcaataatgcagggagagctgttgatattcagacagttatccagcaggccattcaaatgttgtatcctatgttagtgaatggtgtacctgtagcttttgaacaaacagaggatgctttaagtgtatatctgaatacagaattactgttgcctttgttgaaaacactggttgttcctttgctgtcagacgaagaagtggttgctatgctggtggaattgatgaaaaaagaccctgatttcggtgatatggctggtttggctgagccaatgttgaaagcttttcctgagatcatagaatctactactaaagtggagattggtttgaactttgttaagtaaagaagaaaagctgaaattatttgtatagtagtaaggcgaagagagctacctctcttcgccttttttcatagttatttttatttttgtatttcaccttcgattacctgagcaaagtttttttattttctactacaactaggatcacctgtaaaaatatgagaagtgtaatggacacactgtttttctcatatcagaaaatggatttttgtacgtatatctgtatagaattatatagacgtatgtgaaatcttatatgtctcaaataaaattctacatcaaagataaggacgtttttaaaaaagatcaagagcttttaaaaaaagacaaagagcttttttaaaaacgtcttgatcttttttactactactgggactttgtaagctatcattctgtggaagtacaaagtctttatgcgtattattgcgaggaaaaatcctgaaaatatctactttgtatcaagtcgaaacaacttataaaaaagaatatatagctgaaaacaagtagattacgagaatatctgtttcggaacgtaatgagggcatgagagtataagtgagagcatatattattactacttatgtataagtcatttataattaacatattatacatgtagtgagagcatgagggtataaacgtccccaactttctagagaaaaaaactgatatgtcaagaacacttctaaaagttgccggagaacaaaatgatcctttaagagtaaaagtcttccctcatgattttgtaaataaaccactactcctccttatcctacttcagaaatgtgttgtttatcgggaaattgaagtaagataagggggagtagaataacaaatcttcagtggtggaaaacttttggattagaacgcatacccgaatcctacattcaggtagatggcatacatatcaaaagtaacggtcttgaaatctttgttgaatatatcgttcaggccccaattcaggtcggcgtgtaccttcaggtgcttgaacgctttccaatccacacctgcctgaactccccattggaacttgcgtagatcgccggagaagtcgtaagtagcaatggctccgttggtgaaatttatcttgtctccggtgggattggtttcacgtaaatagccttcatatacatgaccactgaaatctccgtccatcagataagaaaagtacggaccgagtttcagcgtggtgcgtggattcagtttgtaggctgctagtacggggatggtgatgtaagagttctgtactttggtgcgtactcctccggtccagtttccttttaggcggtttccgtcatagcctatgatttccatattgtaattcttcacagttgctttggtacgcatgcctttattttccaaacgcagtccagtgatgatcccccatttttttttcgagtccagccacttggtcatgtttccctcgatagtgatagacagggttggattatatccgtctatgctgcgtatttcttcggggaaaggcaatggggcggtacctcctaggttgactcccgctttgatttcgtactcccaaccatgcaatgctgcattgatgattgttttgtttctgtttgtctgcgcatacagtccgaggcttaccaaagccagtatcagggttaatgtatattttttcatatctgtttttatctaagtggttgtttgcataccagttccaggtcatcaataagcagggtgctacccggtgcgccttggaatacatcaccgtccttgcttgccgacaggacaatgctgacgttgtatcctccgtttgccaatttttgaggatctattgtttttccataatgctcatagtcgaattccagttcaaagcgggtccattcgcttgtttcatgcgtgtcggttatgacagcagcggctaccatgttttcatgctcgtaattgttctttgtgatatgaccgtccagcatctgcacatctttggtcttttcgtaaaacagggcatagatattgaaaacgtcttttcggttagtatattctccgttctcatagaattttggtcctgccttgtatttgtagtagccgaccaatttaatgggttcgtaatagaaggttgttccgaatttggttgcagacaacgcatcgctcatggcggagcctatgtcgaaactgccaatgaacaggttacctgctgcaatgggcatacctaccagagtccccaagcttcctgtctcgcgagtaatcagttgcaagcagttacctgtgcggccgtttggactgatgctggtggggaagtcattcggagcgtaaccgcttccggttaaggcaaatccctgattgccactggaccatgtcagtgtggagtagccagaggctgcttcgtatagcacataatattcatttttattataaggtacagtttttacgttttcaaagttaaagaccgtcgggatacttttggtttctggataatggatattgatagcgtaggtgcggtgccaattcttgtcctcagatgttacggtatagcgcactgggttggtgaagttctgtgtgcttccgctggccggttcgatagatgctccttcagtcagctcgaaagtgggggctagtcgggtcaagtcggtgccgttgtttacttctatgtaaatagggtaagcattcaggcttttgtcgtaaggacggttatagtcaatgtctgtacctgttagcatctcggcagggaggatgcagctcaagatgtccgcttccgcattgggggcttcgtccttgatacaggaggtgcaaaggagcagtcctgttactgtgcaggtgaataagtttttcagcttcatgaatttgtaatttaatagttgttcttatacataacagattgcaaaggtactgattttccgtgaaagtgtttgcattcaaaatagaaaggtgcggaaaattgtctttcccgcaccttgaactgcaaatatacttaataataaaggaatggtttttattaaacaataccttgagccatcatagctttggctactttcatgaatcctgctacattagcacctttcacatagtttacataaccgtctgcttcagtaccatattgtacacaagcttcatgaatatttttcatgatacttttcaatttttcatctacttcttcttgactccagcttagtttgatagaattttgagtcatttccaatccagatacagatacgccgcctgcattggctgctttgcccggggcatacaggattttggcttcttggaatacgcggatagcttcaggggtagaaggcatgtttgcaccttcgctgacagctatgacaccattggcaaccaattgtttggcttcatcaccgttcaattcgttctgagtggcagagggtaatgcgatatctgccttttcactccaaggacgagcgcctgctacatatttgcaaccatatttttcagcatattcacgaatacgtccacggtataaatttttcagttccatgatgaaatccaatttttcacggtctattccatccggatcatagatgtaaccatctgagtcggacatggtaactactttaccgcccaactctattactttttctaccgtgtattgagctacgttacctgaacctgaaaccaaacaagtttttcccttcaggtctgtgcctttggttttcagcatttccatcaagaaatagatattaccatatccggttgcttcagggcgaatcagagaaccaccgaattcgcgacccttgccggtcagtacaccggagaattcatgagagagtttcttgtacatgccgaacatgaaacctacttcacggccacctacaccgatatcacctgcaggtacgtcagtctcaggaccgatatgacgccataattctaacatgaacgcctgacagaaacgcattacttcagcgtttgatttgccacgcggagagaagtcggaacctcctttgccaccacccatcggaagagtagttagtgaatttttgaatgtctgctcgaaggcaaggaatttcaaaattcccaagtttacagaagagtgaaaacggataccacctttgtagggaccaatggcattattatgttgtacgcggtaacccatgtttgtctggatgttacctttgtcatccatccatgttacacggaattgatacacacgatcaggaatacacaaacgttcaatcaggtttaccttatcgaattcgggatgtttgttgtattcttcttcgattgtacttagtacttcctctaccgcttgatgatattcaggctcattggggaatcttcttttcagatcttctaataccttagctgcattcataatctacttctttttataattgttaattaattcttcttgtttcttttgatggtgcaaaattatagataaaaattgaaatgtgcaacaaattataaagaaaatgcatgtaagaatatcaatctgtacaaaatgtaagctaaaaagcggataaaagattatttttctctttccttgagatattttaatagtggaataaagactaaagctcccgaaatgataatggatagtattaaaggaccgtcaatatgttcgcttcctgttagaataatatagcaaatggtaatccataatagggctaggattacgatttgtgggagggaaagcggttttcttctcatagtattgttttaacgaattgaatataatttcaccacaaattgcattgatttacacagatagaatttgctggtactaataactaataatctgtgtaaatctatgcaacctgtggtgaatgttatttatttttctttctttttcttgtcaacgatagcgtcaataaccgcaaccgcagtgatgtttacgatatcgcgtacggaagcttcacaatcagtgaaatggataggtttgttcaatcccatttgtatcgggccgattacctcagtttcactcatagactgaatgagctggtaggtagcattggcggaacttagattcgggaatactaacgtgtttacttctttacctttcaaacgtgtgaagggatatttctcatcacgtaatttagtgttcagtgcaaaattgacctgcatctcaccatctatagccagttccggatattctttctgcatgtagtccaccgcatcatgtactttagccgggctgccttctgtatctgagccgaagttggagtaagacagcatggccattgtcggagtgtgattaaagaattctaccgttttctttgacaatttagcgatgtcaatcagcgtgtcggtgtccgggtgacggttaatcagagtatcggctacaaagtaagtacctttctttgaattcaagatatgcattgtaccgaaatgtttatattccggttggatgccgataacttctttcgctaccttgatcgtgttggaatatttggtatatagtccggtgatgaatgcatcggcctctcccgtttcaaccatcatcataccaaagtagttacgctcgaacattttgtcgttggattcctggaggttggctccttggcgtgcgcgtttttccgagaggatgcgagcataacgttcacgacgttcagcttcacggtcatgacgaaggttgatgatttcaattccttccaagctcagatccagttcttttgccagtttctcgatgcgctcgtcattacctaataggataggatggcagattccttcggctttggcttctactgcagcttttaacatggtaggatggataccttcggcaaatactactcgctgtggggcgcgacgggctgtttcgtaaagttgacgggttaatttgctttcttgtcccatcaattcgcgcagccgggtcttgtaggcttcccagttggtgatgtttttgcgtgccactcctgattccattgctgcttttgccacagccatggaaacttcggtaattaaacgagggtcaaccggtttcgggatgaaataatcaggaccgaaagtaaaattattcacatggtaggcttcgttcactacgtcgggaacaggttgttttgccaaatcggcgatagcatgcacggcagccagcttcatttcttcattgatagctttggcctgagtatccaaagctccgcggaaaatataggggaaaccaattacgttattgatctggttaggatagtctgaacgtccggtagacatcagtacatcggggcgggatgccatggcgtcttcgtaagagatttccggagtcggattggctaatgcgaatacgataggatgatctgccatgctgcggaccatatcctgagtcaacacattaccttttgatagtcctaaaaatacatctgcgcctttgatggcttcttccaatgtatgtacatcgcgacggtcagtagcaaaaaatttcttactttctgtcaagttaggacggtcactggtaatcacgcctttgctgtctagcatcaaaatgttttctttccgtgctcctaatgctacgtacagttttgtacaggaagtggctgaagctccggcaccatttactacgattcttacattttcaattttctttccggcaacttccaatgcatttaataagccggcggatgaaatgatagctgtaccgtgttggtcatcatgcattactgggatatccagttcttctttcagccggttttctatctcgaaacattcgggagccttgatatcttccagattgatacctccgaaagtgggagcgatggcctttactgcctgaataaatttttcagggtctttctcattcacttcgatgtcaaaaacatcaatacctgcatagattttgaaaagcaatcctttaccttccatgacaggctttccgctcaatgcacctatgtcgcctagtcctaaaacggctgtaccattagaaataacggctactaagttgcctttcgcagtatagtcgtatgcagtttgtgggtctttctctatttccagacaaggctcagctactccgggagagtaagccagtgacaggtctgtttgtgtgctgtacggttttgtcggtacaacttcaatctttccgggcttgccttgcgagtggtatagcaaagcagcttctttggtaatcttgaccataatctttttcttttaattagatgtcgttttaaattggtggcaaaaatacaaataaaattataatttgaagtctaaagagtgtaaaatgatgtcgaattgatgatttttaaagtattagttttgatcagtgtgaaaatcagatttcattctttcgtgttttgtaggacaaagatagtgaaaaaatagtttcattcatgtccgtattatgtatgagttatagtatggtttacttgtttagatctggaaacagattgaatatatgtgaaatatattttacataatcagtatccttctattgcgcacgttatttatagttaaagctaatgggctaagcgaacaaatgccggaaaaatgactaattttgcggcagtaaaaactaattgggttcaaaaagttttctataaacctctgttaattcgataaataagtaaagttcaataatattagttatgaagatgacagtaaatagtatgaaatgtttttcatggagccgcctcgcgatatttacggcggcaatggccgttttaagcagttgtggaggcggtcagagcggtatgaagttgggtgatgacgagtttaccgtcgtggctgtacagtctacagccagccagcagtctacttcttatcccgctaccatcaaaggtgttcaggatatcgaggtgcgtcctcaggtttccggctttatcgtaaagctttgtgtagacgaaggtgcaacggtaaagaaaggtcaggcactctttcagatcgatcctacacagtatgcggctgccgaacgtcaggcaaaagctgctgtagagatggcaaaatcgaatgtcaatacgctgactttgaacgaacaacagaagaaaaatttgtatgataagaaaattatcagtgattttgagtatcaaagcgcagtagaccaattgctttctgcaaaagccagtttggcacaagctgaggctcagttgaccagcgctcgtcagaatttaggtttctgtacagtgaccagtccttcagatggtgtggtgggtacattcccgtatcgtattggtagtttggtgagtccttcggttacacaaccgttaactaccgtgagtgaaatcggtgaaatgtatgtgtatttctctatgactgaaaagcagttgttgggtttaacaagagccggtggcacactgaaagaacaactggagaagatgccggctgtgaaattggagttggctgacggtacgatgtatactgaagaaggtaagattgacgctgtaagtggtgttattgatcagactaccggttcggtaagtatgcgtgccgttttcccgaacaaacagcttgtattgcgtagtggtggtatggctaatgtaattttcccttatactatggaggatattattttgattcctcagtcggctacacaggaaattcaggacaaaaagtttgtttatgtgcttcagtcggataatacattgaagcatactgagatcaaggtatcgaatttgagtgacggtaagaattatattgttaccagtggtttgaagcccggcgataaaattgtagttgaaggtgtacaaacgttgaaggacggacaaacaattactccgattactccggaacagaaagaggcgaaatatcaacaacacctgaaagatcagaaggaaggaaatattgccacggcctttaaataatcaaaaataaacagattaacttcgtttatataaataaggtatatagagaatgaaactagatagatttattaaccgtccggtgctatcaacggtaatctccgtcttgatagttattctgggtatcatcggacttgctacattgccggttacgcaatatccggatattgcacctcctacggtgcaggtacgtgccacctataccggtgcgaactccacagctgtattgaattcggtcattgctccgttggaagaccagataaacggcgtggagaacatgatgtatatccagtcatcagcatccaataacggtgctgccgatattaacgtttactttaatcagggaacagatccggatatggcggctgttaatgtgcagaaccgtgtttctatggcacaaggattgttgcctgctgaagtaaccaaagtgggtgtgactactcagaaacgccagaactccatgttgatggtcttttcattgtatgatgaaaccgactcgtataatatcgagttcattgaaaactatgctaatattaacttgattcctgaaatcaagcgtgtaaagggggtaggtgacgctaatgtgttgggacaggattattctatgcgtatctggttgaaaccggatgtgatggcacagtacaaactggttcctactgatgtttcggcagcattggccgaacagaatattgaggcggctccgggacagttcggtgaacgtggtgatcagactttccaatatacgatccgttataaaggacgtttgcagcaaacaaatgaatttgaagatattgttatcaaggccttgccggatggtaatgtacttcgtttgggagatgtagccgatatagaattagggcgtctggcttatacattcaataatacggtaaatggccacaaggctgtatcttgtatcgtttatcagatggcaggtactaatgctaccgaaactatttctaatttggaggaagtgcttgcaaaggcacaggaatcactgccgacaggtttgaatatcaatattgcccaaaatgccaatgacttcttgttcgcttctatccatgaggtaattaagacattgattgaagcatttattttggtgtttattgtggtatatatcttcttgcaggatatgcgttcaacactgattccggctattgccattccggtggcgctggtggctactttctttgtgctgaaactgattggtttcagtgtgaacctgctgactctttcggcgatggtgcttgccattgcgattgtggtcgatgatgccattgtcgtcgtcgagggggttcatgccaagttggatcagggatataagtcttcccgtgaggcttctattgatgccatgagcgaattgggtggcgctatcgtttctattacattagtcatgatgtctgtgttcattccggtaagtttcatgggaggtaccgctggtacgttttatcgtcagtttggtatcactatggctatcgctataggtttctctgctttaaatgcgttgactttgtcaccagcattgtgcgctattttcttgaaaccgcatgatgaaggacatggaacaaagaagatgactcgtgtggaacgattccatacagcctttaatgcggcttatgattctatattgaagaagtataagaagcatgtagtgttctttatccataagaaatggttgtcattcgggttggttaccgcttctatcattttgttggtattctttatgaaggttactccgacgggcatggtgcctaatgaagataccggtaccattatgggtgcagtgacactgcctcctggtacttcacaggaacgtgcaatggaaatcttaaaccgtgtagacagcttggtggctgccgaaccggctgtagattcccgcacggtgatttccggtttcggttttattggtggtcagggtccttcttacggttctatcattattaaactgaaagattgggaagaacgttccatgatgcagaattcggatattgtggtaggtacgttgtttatgcgtgcacagaagatcatcaaggatgcgcaggtattgttctttgctcctcctatgattccgggttattcggcatccagtgatatcgagttgaatatgcaggataagaccggtggagacttgaatcatttttatgacgtcgttttggactatatggatgcgttgaaggcacgtcccgaaattaattcggctcagactaccttcaacccgaacttcccccaatatatgttggatattgatgctgctgcttgtaaaaaggcaggtatcagccccagtgatattctaactaccatgcagggatatttcggtggtttgtatgcttctaacttcaaccgtttcggtaagatgtatcgtgttatgattcaggcggaacccgaagcaactaagaatctggaatctttgaatagtatcaagatacgtaatgggaatgagatggctcctatttcccagttcgtttctgtcaagaaagtatatggaccggatgttatcagccgtttcaatctttatacttctatcaaagtgatggtggctcctgccagtggctatacttccggacaggctttgcaggctattgcggaagttgccaaagagaatttgcctaccggttatggttatgagttgggaggtatggctcgtgaagaggcatctaccagtggcagttccacaggtatcatcttcattctgtgttttgtattcgtttacttgttgctaagtgcacagtatgaaagttacattctgcccttgtccgtattgctttcagtaccgttcggtctgttgggtagcttcctgtttgtaaacggatttgcagcattgggaaatattccggctttgaagatgattttaggaaccatgtcaaatgatatttatatgcagattgcattgatcatgttgatggggttgttggcgaagaatgccattcttattgtagagtttgctttggatcgccgtaagcagggaatgagtatttcctgggctgcggtcttgggtgcggcggcccgtttgcgaccgatcttaatgacctcattggccatgattgtaggtttgattccgttgatgttggctatgggagttggtgctcatggtaaccgtactttgggagcttcggctattggtggtatgttgattggtatgattttccagatctttatcgtacccgtattgtttgtggtattccaatggttacaagagaaattcaaaccgattgagtgggaaagtgtggacaatacagaggttgaacccgaaattgaacaatacacccgtaaatgaacagaagaacaatgaaaaagataataggattatgttgcgcgacgtttttattaagcggttgccacatctataaatcatacgatcgccccgagtcgatagatgccacaggcatctatcgtgacccggttgccgccaacgatacattggctgctaacgatacaaccaatatgggtaacttgtcatggaaggaaattttccgtgatccgaaattgcagatgctgattgaagagggattggcaaacaatgtagatatgcaggctgctatcctgcgtgtgaaggaggcgaaggcgttattgacatcagctcgcttgtcttatctcccttctttggcccttgccccacaaggttcgttgactagtgtggacaaaagtactcctgtaaagaactatactttacctgcttctgcaagctgggaagttgatttgttcggcaaattgctgaatgcccatcgtggccagaaagcatcttatttgcaaagtaaggcctatcagcaggcagtgcgttcacagttgattggtggtatagccaatgcttattattctttattgatgctcgaccgtcaagtcagtgtgaccgagcagaatgtggcgttaatgaaagaaacagtgcgcactatggaagcaatgaaggaagccggtatgactaccgaagctgctgtggcacagagcaaggggacttatcatcagacggaggcttcattggctgacttgaaacgtcaggtgcgcgaaactgagaattctatttccgtattgttggcaaaggctccccagaatatagatcgtggaacattagaagaacaagtgatgcctgcagatttggctgtgggagttcctttacagttgcttgagaaccgtcccgatgtaaaagcggcagaattggcattagctagcgcttattatactaccaatcaggcgcgttccgctttttatcccagtgtcaatattacaggtactttgggatggactaatggttccaatggtacagtgatttctaatcctgccgttatgctttggaatgctatcggctcattgactcagcccattttccagcgtggaaaattgatagccaatttaaaagtatcgaaagcggaagaacaaattgccaagatgaattatcagcagactattctggaagctggtaaggaagtaagtgatgctttgttcctgtatgatacggcagacaaaaagttgagtgagcaccaggcacaggtttccgaaatgcaaaaagcggtggagatgaacaatgatttgtttcaggcgggaaaggccacttatctggaaatcattactgcacaacagtcattgctgagtgcacagttgaacgaagtatccgatactttccagcgtatgcaggctgttatcaatctgtacagcgcattgggcggtggacgtgaataattaaccttaaaaataatatgaatatgattagtccgttagcttatgtagacccgtcagcaaaaatcgggaaaaacgtaactattcacccgtttgcctacattgataagaatgtggagataggtgatgataatgtaatcatgcccaacgccagcattatgagcggcgcacgcatcggtaacggaaataccatttataacggagctgtaattgctgctactccgcaagattttaaatatacgggtgatgataccatcgcccgtataggtaataataatacaatccgtgagaatgcggtaattattcgcgctactttcgccggagatgagactgtggtaggaagcggtaactttattatgcagggagcacgtatctcacatgatgtgaccatcggtaacaactgtattattggtaacggttcgcaggtgtcaggttgttgtgtagtcgaggattatgctattcttacttccaatgtattgatgcagggaaagactcgcttgggggcttatgctgccgtacagggtgggtgtcgttttaccaaggatattcctccttattgtgtagctgcccatgagcctacggctttttatagcatcaataccaccgtgttgcaacatgaaggtttctcggaaacggttattaaacatatagcgcatgctttccgtatattgtataaagtgaatacatctacagaggatgcattgcgtcgtattgaagaacaggttccgtttagtcctgaaattgcacatttgatagagtttgtcagaaattctaagttgggtattataaaataagtgtatctttgtttccctttatgttaagaatgaacagcgtcaggaaaaaaagaacggataaaacggtagtgaaggaacacattgttttggcggcagcgaaagcatttgcacagaaaggtgtcaaaacagtgagaatggatgatattgctaccggattatctatatctaaacgcacgctttatgaattgttccatgacaaagaggatttattacttgatgttatgaaactacatcgggaggagatgcaggaatatatgactcaagtggcttccaaagcagaaaatgttttggaagtcctcttgaagttttttcaaagaagtgctcaggattttcagaatacaaacaggaaattctttgaggatattgagaaatatcccaaggtaatgcgttacattgatgaaagccggaaggagaatttagattcggctatggaattttatcgcaaaggggtggaacaaggcatttttagaaatgatgtaaattataatattgtacgcgccatggtatgtgagcagatggacttgttattgcattcggaaatatgcaagtcctattcgcttggtgaaatttatgaaacagttgtatttatgcatatgcgtggcatttccactgaaaaggggttgaagattgtggatgattttttattgaatttaaaaggaaacgaacataataagtatggttagaaactaaataagtcactaaataaagagtaatagttaatgaaattttattgcaaacctacgttaaccttgtttttgctgctttatgtagcaatacaaagtgcacaagcacaagacacattgaggattaccttacaggacgcagtccggatagcattgagcgacaatcccaccattaaagtcgccggtcaggaaatcctgttaaagaaagaagctcgccgggaagcttatgccggtcttttcccagaagccagtttggtgggcagttattcacgagccataaaaaagcagtcatttgccatgatgggagaggtgattgaagtcggtacagataatacttatagtggtggtctgtctgtcagtctgcctgtctttgctccggctctttacaaaagtataagtttgacaagtacggatgtgaacttggctgtagagaaatcacgtgcttcacgtctggatatggtaaatcaagtaaccaaagccttttttcagttgcttttggcacaagacagttatgaagtgctgcttaaaagttataagcagagtgaagataattataatgtggtgaaagctaaatatgaacagggaactgtcagtgaatatgataagattagtgcggatgtgcagatgcgcagcttgaaacctaccgtggtgtctgcccgtaacggagtgaatttggcaaatctgcagttgaaggtcttgatgggaatggagtctgatgtaaaggtagcggttgaaggcaacctgaaggattacgaaatgtctatgtttactcgtcaggcaatgcctcgcccagacaatttgataaataacagtacgttgaaacaattggaactgaatgcattgcaattaaagcagacgctgaagttgcagtataccaattttatgccgaccctttctgctagtttccaatatatgtatacttcaatgaatgataatttcaagttcaaggaatacgattggaggccctattctactatcggtctgaatctaagtattcctttattcaaaggaagtaattttactcaattgaaacagacccgtatccagatgaagcaactggaagagaaccgtatcaatacagagcggcagctcactatgcaagctaccagttacttggataatatggctgctagtacggaacaggtggtaagtaataaagaagctgtatttcaggcggagaaggggcgtactattgccgaaaaaagatatgaggtaggaaaaggaactatcttggaattgaatagttcggaagtagctttaacggaggcccaactgacttataaccagtccatctatgactatctggtagctaaagctgatttggacttagtcttaggcattgatgaagtaacggaacaataacacattaacataaagataatagtatgagaaaatattttcaattcgcagctttgctggtggtaactatgctgagtgcatgttcaggtggaacggagagtaaggaagctgctgataccgctatggaggacaaaccggtagtgcggcttgcttccgtaacttcccgcgatgtagatcagatagaggaatatactgccactgttgaagcggaagcgaaaaataatatagctccgacctctcccgggcgtatagaccgtatttttgttgaagtgggagatcatgtatccaagggacagaaattagtacagatggatgcggcaaatctgaaacaaatgaaattgcagttagaaaatgaagaaacggaattcagacgtatggatgaactgtacaaagtgggtggagcttccaaatctgaatgggatgcagcgaaaacaactttagatgtacgtcgtacttcctataataatttgttggagaatacgcagttattaagtcctattaatggagtggttacagcgcgtaattttgataacggtgacttatattcttccgcctccactcctgtgttggtcatagaacagatcactccggttaaactgttgattaatgtatccgaaccttatttcccgaaagtaactaaaggtatgaccgtaaaggtgaaatttgatgtgtatggtgatgaggaattcgaaggaaaagttagtttggtttatcctactattgatgctactactcatacttttcctgtagaggtaaaattggctaatacccatcagcgtatacgtccgggaatgtttggccgtgtgactgtgagttttggtacattgcggcatgtggtagttcctgatcaggctattgtgaaacgtgccggttcgggcgatcgttatgtatatgtctacaaagacggtaaggtttcctataataaagtagaattgggacgtcggatgggaaccgaatatgaattgatttccggggtggaggataattcgcaggtggtggtcgccggtcagacccgtttggccgatggtgtggaagtggcagtaaattaaaaattgagagttagttgataatactctatatttatttacctatatatgattttttagttcttaattttcaatttttaatttaacaaacatgagtctatacgaaggagcggttaaaaaaccgattatgacctcgctatgctttttggccgtagcaatctttggtctgttctcattgtcgaaacttccggtagacttgtatccagatattgataccaataccattatggttatgacatcttatcagggtgccagtgcttccgatatagagaacaacgtaacccgtccgttggaaaatacgttgaactcggttagtaatttgaaacatattacatccaagtcttcagaaaatatatcagttatcactttggaattcgaatatggctatgatattgatgtgttgactaatgatgtgcgtgataaattggatatggtgagttcacaacttcccgatgaagtcaatactccgattatctttaagttcagtacggatatgattcctatcctgctgttgtccgttcaggcagaagaaagtcagccggctctatataagatattggatgataatgtagtaaatccattggctcgtgttcccggcgtgggaacggtgtccattgccggtgcgccaaaacgtgaggtgaatatttattgtgatcccaacaaactggaagcgtatgatttgacgattgagaccatcagctccattgtcggggctgaaaataagaatactccgggcggaactttcgatgtgggcagtaatacctattccttgcgtgtggaaggggaattcaaggacccgaaagaaatggagaatatcgtagtgggtacacgcaatggtgcttcggtgtatttgcgtgacgtggcaacggtagtcgattctgtagaagaacgtgctcaggaaacctataataacggggtgcaaggagctatgattgttgtacagaaacaatcgggtgcaaactctgtgaacatttcccagaaagtaatggaccagttgcctaagttgcagaagtcactacccagtgacgtgaaactgggggttattgtgaatacttcagataatattttgaataccatcgacagtttgacggaaactattatgtatgccattctgtttgtggttttggtggtatttgttttcttaggtcgttggcgtgctacagtgattatctgtatcactatccccatgtcattgattgcctcttttatttatttggccatcacggatgggggatcgctgaatattatttctttgtcgtgcctttctattgcgattggtaatgtggtggatgatgctattgttgttttggaaaacgtgacgacccatatcgagcgtggctccgagccgaaacaggcggctatccatggaacaaatgaggtggcaatttctgttatcgcatccacattgactatgattgcggtattcttcccgttgacgatggtcagtggtatgtcgggagttttgttccgtcagttgggctggatgatgtgtgttattatgactatttctactatctcggcgctgtcatttactccgatgatgtgtgcgcagatgcttcgcttgcaaaaaaaacaaagcaagtgttttgtcacattctacaaaccaatagaacgtgcgttggacgggttggataactggtatcagaaacgtttgaactgggctgttcgtcaccgcaggactattattgccggttgtttcgggttctttctgctgagcctgatttgtgcgaaaggaattggtacagagttttttccgtcacaagacaacagtcgtatttctgttcaattacaattgcctatcggagctcgcgtagaacgtgcccaggcattggctcaggaattgaccgaaaagtggctgaagaaatatgaaggggtgatgcgtatctgtaactatactgtgggacaggctgatgcagataatacttgggcttctattcaggataatggtagccatatcatttcattcaatatcaacctttataatcccgatcaacgttctgttacgttggcagaagtctgcgatggtatgcgtgaggatctgaaagcctatcccgaactggataaagctcaggttatcctgggtggtagcagtggaggcatgggtggacaggccactgccgattttgaaatctatggatatgattttacagagacagataaagctgcagctgaattgaaagaagctttattgaaagtgaacggtgtatctgaggtgaatatcagccgtcaggattatcagccggaatatcaagtggattttgatcgtgaaaaattggctttacatggtttgaatctttctacagcagctttgtatctgcgtaaccgtgttaatggtgctttatcttcttactatcgggaagatggtgacgaatatgatatcaaggtgcgttatgctccccagttccgtaccagtattgaaagtttggagaatattctgatttatactaatgaaggtaaagcgattcgggtgaaagatatcggtacggtggtggagcgttccgctcctcctactattgaacgtaaagaccgtgaacgtattgtaacagtttccgctgtgatttcaggtgcgcctttaggtagtgtggtggtggcaggtgagtctattattgataagatggatttacctagcggtatcagtatccaggtggcaggttcttatgaggatcagcaggattcattcagcgatctgggaactttggctgttttgattattatattggtatttattgtaatggctgcccagtttgagtctctgacctatccgtttatcattatgttctctattccgtttgcattcagtggggtattgatggcattgtatggaacggggactacattgaatgtcatgagtttgttgggaggtatcatgttgattggtatcgtagtgaagaatggtatcgtgcttattgattacattaccttatgtcgtgagcggggcatgtctgttattcattcggtcgttgtttcgggccgtagtcgtttacgtccggttttaatgaccactttgaccactattctaggcatggtgccgatggcgataggaggaggggaaggttctgaaatgtggcagcctttaggggtgtccgtaatcggtggtttgactgtatctaccgtgctcaccttgattttggttccggtgctctactgttcatttgccggtacaggtatcaagcgtaaccgtaagaagatgaaagctgcccgtgagctgaatgactattatcaagcgcataagacagagatgactaaaggtaaaaaagaataattaatatatttgttatccgaatcgaaatgaataggggaccggatgacagaacttaaaataaaaaatggaataatgaaatctgttttcatcactttcgaccaagctttttacgaacgtattctggcattgttggatcgccagaattgtcgtggattcagttattggcagcagttgcaggggcgcggctctgtaaaaggagaaccgcattatggcagtcacgcgtggcccagtatgtgctcggctattatgacagtggtagatgacaccaaagtggatccgttattggacgccttgcataaaatggataaggaaaccgaacaattgggattacgtgcttttgtgtggaacatagaaaagacgatttgaatctgtcttttcattattaaagaaaaagactgttgccctctttctggcgcagtcttttttctttttttagcctctatcatgaagtactccgtctaaaaaatcactacttttgcggttaatttacaaatatagcaatatgaaaaactatataccggctacttttcttctcacttttatcgtagtaggagcgttaatggggctgtatttccttccccccatgtcggtgggaggcaaaccgttgcgcaaggtggacctgttggctgatatccgtccggatgtggaagaagaagtatgtgattccgacaccattgttcttcctcctcctgtaaaacctatttttgtggatacatgtaaaacgggtattacctgtattgaggattattcggattccaccatgcggggaatgaaacatttttatgaggcactttccaaagtgaaaaccatgaaacgccctgtacgcatcgcttacttcggtgattcttttatagaagctgatatttttactgccgatttgcgcgaaatgcttcaacaagaatttggtgggtgcggagtgggatatgttcctgtaacctcttccatcagcggttaccgtcctacggtacgccatacttttgggggatggagcagtcattcatccaatgactctgttggttttgataaaatacagcaagatatttccggacattattttttccctcgtgaaggtgcttatgtgcagttaaaaggacagagtaaatatgcttcccgactggatacctgtgaggtttctactttttatttcctaaataaaggttttgccgctgtccgttctaaagtgaataatgctgcggaaggagagttgcatgaggaagtaggaacaggaggtgtgcaggctgtttcggtgagaggaaggataggacaagtacggtggagtgtggaacatgctgattctgctactttctatggagtggctatggatggcaagcagggaatatctttggataattttagcgtacgtggtagcagtgggcttcatttacgtagtattcctttacatacgcttcgcgatttccaacgtcttcgtccatacgatttgattgtggtccaatatggtttgaatgtggctacggaacgaggcgtaaaatacgatggctataagaaagggatgcttacggtgatagagcatttgaagacagcttttcctgaaaccagcattttactggtcagtgtgggtgaccgtgaatataaaaacgagaatggagatctccgcaccatgcccggagtcaagaatcttatccgttatcaacagtccattgcggctgatagccatatcgctttttggaatatgtatgaggcaatgggaggtcaaggaagcattgtcgatatgatcgggcaaaaaatggcgaatcttgattatacccatatcaattttaagggaggcaggcatttggcaggtatcttatttgaaacattgatgtatggcaaagagcaatacgaaaagcggaaagcctatgaggaggaataacagatttcttggtctgtccggtgtagcaatggtattgtttttgttcttgctgtttccatgtctttatgcccaggatgctattccggcattgtcccgaccgttggagccgcttcgcatacccggtgaaacaaaggaaatgcatcgtggtatgcggctgataacagtacatgattcacttccggcgagttttactcattctttagataatgtgatagaagatgagagccgttcgctttctcctttctttcaaaaactgaatgatatgacgggaccggtacggatagtccatataggtgattctcatgtgcgggggcatctttatccattaataacccgtcgttgtctggaacatgattttggtgctgaggctgtttatcctgataccatttcatatcgtaccgaagggttggcacatgagacgggcgaaccgggtattgtttatcatatgcttggcattaatggagctacttctgttactttctctgacgatgaaaaaataaaaaaaatagcttctttgcatcctgatctgattattgtttcttttggaaccaatgaggcacatagccgccgttatctggctcaggctcacaaaatgcagataggcagactgttgggtatgttgaaagctgcctgtcctgaagcgttttttttacttactacacctcccggagcatatgtgggacgtcgtcgtgcacgtactattaatccgagaaccgtaacggctgcacgtattataaaggagtatgcacaagagcataaaatggcagtttgggatatgtataatatagtaggaggaaagacagatgcttgtcgtaactggacgaagcaccacatgtttcgtgcggatggcattcatttcactcccgatggatatcgtttacaaggtaatttattacatcaggcactgattaaagcgtataatgaatatgtggcaactggattggagtaaactggctgaagtattgacttataatgccaagcaaccgatgatttttagcagcggcttgtttttgtttctgtttttgggctttagcctgatttatatgttattgcagaaaaaggatacggcacgcatcctgtttgtaacgctgttttcttattatttctattataagagtagcggtttttattttttcttgctgggggtggtgacagtgacggatttcttgctggcagggcgtatggcgcataccgaaactcaatggaaacggatgtttttgctgctggcaagtctgggaataaatttaggattgctctgttatttcaagtataccaatttcttttatcagatgctggctcctttgtggaatggtaaattccagccgttggatattttcttgccggtggggatatcgttcttcactttccagtctttaagttataccatagatgtttaccgtcgtgaattggttcctttgaacaggttgttggattatacattttatgtgtctttttttccacagctggtagcgggtcctattgtacgtgcccgcgattttattcctcaaatcaggcaaccgctgtttgtttcctcggagatgtttggtaccggtgttttctttatcatcagcggattattcaagaaagctgtaatctccgattatatcagtgtaaattttgtggaacgtatttttgataatccggctctttattccggggttgagaatttgtttggtgtatatgggtatgctttacagatttattgtgacttttccggatatagtgatatggctatcgggcttgctttgctgttgggcttccgttttcctatgaactttaattcgccttataaagccgatagtataaccgatttttggcatcgttggcatatctctctttctacatggttgcgagattatctttatatctcattggggggaaaccgcaaggggaaggcccgtacttatattaatttgtgccttactatgttgttaggtggtttgtggcatggcgcatcttggaattttgtgatatggggaggatttcatggaatagcactggctgcacagaaattctggcgtaacttgctgcataagcctaagacggccactagtaagggcattcgtaaattttttgcagttcttattactttcaattttgtttgtttctgctggatatttttccgtaatacgacttttgaagcttcggttgttatgctgaagcagatatttacagcttttcatcccgaggtattcatgcagctgatagaaggttattggaaagtgtttgttttgatgggaatagggtatttgctacattttgctcctgatagttggcaggatgcgtgttgtcgtggagttgtaaaattacctttattgggaaaggcattattgttggtagtattgatttatttggttatccagataaagagcagtgatattcagccgtttatttatttccagttctaacggaatagttatcaatcgggtgtctgaaaagatatctagtcagacaccctaaaatacgattatagtaagtatttattgatatatctacgatcccaatttatacctctctttataatttttgcagggatgcctgctaatattatattcggttcgtggaatacttttgttacaatacttccccaacccacaatactgtcatcgggtatttttgtatttttaccaatctttacatcttttcctacccatacatattgccaatttctatactttgagcaaattaatcggttttccctttaaatttgttatagtatgtgcgtcggtacaccaaataccaatgccccagcttaattaaccgtgttactgtttcctttgataatcaacagaaaatattcattaaaaagtagtttttcaacattctcttctgaatcgaaatgcatggaaacatgattgttgtttcctgtaattatgatgttggatcgattgatgatttgattgaattgttcatgatgggaggatacacaatctatttttgtcatgtggtaaaataattgtaatttcattgccttgaccattgatatttttcatctcattctaatttaatagtttatacaacttcttttattttatatttgaagaatattcttgtattatcgtgttggttagtttagagaatatttctggagatagtaaataaaaaggagtgtcttctttttcttttttaaagcgtataaatagatgtttgatgtctcgggcttccggatattcataagcttctattctttctatatgtattccttcctgttccaatagttttaatatgtgtctccattgttgcttggatagaaatcggcatacatcatataaggagaggggtgttccgtccgaagctgttatgatagtagaagttatattcattttgatgatttgatgaggacaaatatagcaataaaaaattatatagtttattggagcattgactaaatgctagaatattatttattttcagttccctttatgatataaagcggggatgaaacttgcaaacttgcaaaacttgcagcacttccacacccacacacgtgcgcgtacattataatgtggaaaaatgagagggtacaaggagggtatgacaagcaacggtggaggaggacaaacggacgatgcaggggagagctgaaatggaggaaagtatgacgggacacagaaggtggagcgggggaaaagggagagatgtgacaggatttttggtggaaagaggtgggacccgtataaggagaaaaaaggaaagtggaagacagaaaccggaatcggacagacacaggtggcaaagggatgactgtccgaaccttcagcaggtatctgtacagaccggagccttccgccaatcatgctggtacagcttgcataattccgtggagaacaagctgtcggcatgcagaataacgcgctatcaatctaaatggaacacgttactaacgtgcagacctgtatgttagtaacgtatagggccacacgttactaactttacggaacacacgttactaacccttcggagcacatgaactgtatgaagacacacggcacgacatcccgtttccgaggcactgtcctgtcagaagacctgccgcctgctgttctccagccggcattggctgtagtaatggccttttaaaggaatctcctcatcaagacgcatatatttcacaaaagagaaaaaacgtgaacaagaaaacaggagggagatcaggtcattcacagatcacaataaagaaatagagtgaaattttggaacatattattttgttgcattattaatgtacgcgcacgtgtgtgggagtggaagtgctgcaagttttgcaagtttgcaagtttgccttccgttttttttctttttccgtttttgtttacgcgcgtgcgaatattataatgtgtctgtctttttcctcccgtgtcctccgttataaaaaccttctttgtaacacatctgtgattcagcgtattacaaaaaagtttcagggaatccggataatttgtcttgtgaaagtttgcctgttagcgttaaaaggtctacttttgcacccgcaatcgagagagatgcggcacttcagacagtgttactgacttggtgaaacaaacgtgggagattttccttgatagtgatctgcacctggtatcttaccttagcggggctaagggagcgagaacggataagaccccgggaggatggatggtccgccttttatggaagtttcgaaaaaaaactttttcaaaaaaactttcgaaaacatttggtggttacgataaaatctcttacctttgcatccgctttcggaaacgatggcaaacaggaataggagttctttgaaagatttaagataaacaaacaagtagtacaagccggtgcaccgtatatataatatggtgtacggaaaaacaagaaccgtcaatatttttattgtattgatagatttggagtccttgagcgtaaagtcaacttaagtgttgaaaagaatatttttacaatgaagagtttgatcctggctcaggatgaacgctagctacaggcttaacacatgcaagtcgaggggcagcatggtcttagcttgctaaggctgatggcgaccggcgcacgggtgagtaacacgtatccaacctgccgtctactcttggccagccttctgaaaggaagattaatccaggatgggatcatgagttcacatgtccgcatgattaaaggtattttccggtagacgatggggatgcgttccattagatagtaggcggggtaacggcccacctagtcaacgatggataggggttctgagaggaaggtcccccacattggaactgagacacggtccaaactcctacgggaggcagcagtgaggaatattggtcaatgggcgatggcctgaaccagccaagtagcgtgaaggatgactgccctatgggttgtaaacttcttttataaaggaataaagtcgggtatgcatacccgtttgcatgtactttatgaataaggatcggctaactccgtgccagcagccgcggtaatacggaggatccgagcgttatccggatttattgggtttaaagggagcgtagatggatgtttaagtcagttgtgaaagtttgcggctcaaccgtaaaattgcagttgatactggatgtcttgagtgcagttgaggcaggcggaattcgtggtgtagcggtgaaatgcttagatatcacgaagaactccgattgcgaaggcagcctgctaagctgcaactgacattgaggctcgaaagtgtgggtatcaaacaggattagataccctggtagtccacacggtaaacgatgaatactcgctgtttgcgatatacggcaagcggccaagcgaaagcgttaagtattccacctggggagtacgccggcaacggtgaaactcaaaggaattgacgggggcccgcacaagcggaggaacatgtggtttaattcgatgatacgcgaggaaccttacccgggcttaaattgcactcgaatgatccggaaacggttcagctagcaatagcgagtgtgaaggtgctgcatggttgtcgtcagctcgtgccgtgaggtgtcggcttaagtgccataacgagcgcaacccttgttgtcagttactaacaggtgatgctgaggactctgacaagactgccatcgtaagatgtgaggaaggtggggatgacgtcaaatcagcacggcccttacgtccggggctacacacgtgttacaatggggggtacagagggccgctaccacgcgagtggatgccaatccctaaaacccctctcagttcggactggagtctgcaacccgactccacgaagctggattcgctagtaatcgcgcatcagccacggcgcggtgaatacgttcccgggccttgtacacaccgcccgtcaagccatgggagccgggggtacctgaagtgcgtaaccgcgaggatcgccctagggtaaaactggtgactggggctaagtcgtaacaaggtagccgtaccggaaggtgcggctggaacacctcctttctggagaggatccaaagtaaaggtttttgtttttgtactgctgttgttgtttattcaagatatgattccgtattaagacggaagcgagaaagtaagaagccgggtctaatgaaacagactaggttgaacttagtcctatagctcagttggttagagcgctacactgataatgtagaggtcggcagttcaactctgcctgggactacgaatcttgagattcgggggattagctcagctggctagagcatctgccttgcacgcagagggtcaacggttcgaatccgttattctccactccatcagaaacgtaagatacgaagatgaccgatctatgacatattgtacaagcaaacagtaattttagtagtaaagagctgaaagtatatatcatcccgctggcacgcaagtgtgggcgaatgaataaggaaagtaaagaagggcgcatggcggatgccttggctctcggaggcgatgaaggacgtgataagctgcgataagctccggggaggtgcaaataacctttgatccggggatttccgaatgggacaacccggcgtgttgaagacacgccacctgatcatttcaggagctaacgcagggaactgaaacatcttagtacctgcaggaaaagaaaataacaatgattcccccagtagtggcgagcgaacggggaatagcccaaaccgttcatgttacggcatgatcggggttgtaggactacgtcgttgcatgaagacatcggagaagaactttctggaaaggaagaccatagagcatgacagttgcgtattcgtatgttgtcgaagcatagtagtatcctgagtagcgcggagcacgaggaattctgcgtgaatctgccgggaccatccggtaaggctaaatactcccgagagaccgatagcgaaccagtaccgtgagggaaaggtgaaaagcacttcgaacagaagagtgaaatagttcctgaaaccgtgcgcctacaagcggtcggagctgcttaaagcagtgacggcgtgccttttgcataatgaacctacgagttgcctttgccggcaaggttaagtgtgacgacacacgtatccgaagcgaaagcgagtctgaagagggcgtatagtcggcagtggcagacgcgaaaccaagtgatctacccttggccaggttgaaggctgggtaacaccagctggaggaccgcaccaataagcgttgaaaagcttctggatgagctgagggtaggggtgaaaggctaatcaaacttggagatagctcgtactccccgaaatgcatttaggtgcagccttgtgggttactgatgtgaggtagagcgactgataagatgcgagggcttcaccgcctatcaagtcttgacaaactccgaatgcgcatcagttttacctcaggagtgagggcatgggtgctaaggtccgtgcccgagaggagaagaatccggaccacctgctaaggtcccgaaatgacagctaagttaaactaacgaagtctgactgctaagacagctaggatgttggcttggaagcagccattcatttaaagagtgcgtaacagctcactagtcgaggagtctggcgtggataataatcgggtattaagttgtctaccgaagcagtgggatcattgaaatgatcggtaggggagcattccagtcagcgtcgaaggcgtaccgcgaggtattctggagcgtctggaaaagcaaatgtaggtataagtaacgataaagggggcgggaaaccccctcgccgaaagactaaggtttcctgatcaacgctaatcggatcagggtaagtcgggtcctaaggctcagccgaagggcgatgccgatggcagaaacggttaatattccgttactacctccaggagtgatgtggagacgcagtagtgacaatgccgccatctgacggaatagatggttgaagggtgtagatgttgatcttggcaggcaaatccaccatgagaatcgaacctgatagtatgccgcgtccctcgggacaaggcaatagtgcatgtaatcatgctgccaagaaaatccgctaaactaaatcctgtaggtacccgtaccgtaaacggacacacgtagtcgggatgaatattctaaggcgcttgagtgattcacggttaaggaactaggcaaactgaccctgtaacttcgggataaagggtccctacccggtgacgggagggcgcagagaataggtccaggcaactgtttaacaaaaacacagggctgtgctaaatcgaaagatcctgtatacagcctgacacctgcccggtgctggaaggttaagaggagacgtcatcgttgagagaagcgttgaattgaagccccagtaaacggcggccgtaactataacggtcctaaggtagcgaaattccttgtcgggtaagttccgacctgcacgaatggtgtaatgatctggacgctgtctcaaccgtgagctcagtgaaattgtagtatcggtgaagatgccgattacccgcgatgggacgaaaagaccccgtgaacctttactatagcttatcattgaatctgggcacgtgatgtgtaggataggtcggaggctttgaagggggtacgccagtatccttggagccgctgttgaaatacgacccttcatttgtttggattctaacccgtgtatatggggacactgattggtgggtagtttgactggggtggtcgcctccaaaagcgtaacggaggcttctaaaggtgccctcacggcgattggtaaccgccgttagagtgtaatggcataagggcgcttgactgggagactgacaagtcgatcaggtaggaaactagagcatagtgatccggtgtttccgtatggaagggacatcgctcaaaggataaaaggtactccggggataacaggctgatccctcccaagagctcatatcgacggagtggtttggcacctcgatgtcggctcgtcacatcctggggctggagaaggtcccaagggttgggctgttcgcccattaaagtggcacgcgagctgggttcagaacgtcgtgagacagttcggtctctatctatcgtgggcgtatgaaatttgcgtggctctgacactagtacgagaggaccgtgttggacagacctctggtttaccggttgtgccgccaggtgcattgccgggtatctaagtctggatcggataagtgctgaaagcatctaagtacgaagccggccacaagattagatttctcagggtcgttgtagactacgacgttgataggatgcaggtgtaaagatggagacatcaaagccgagcattactaattgcccgtccactttccttatattttggatggtgtatacgttcggttattactacaggataagataacgctgatggcttgtcgatatgtcgctcttattcaggtggctatagcacaagggttccacctcttcccattccgaacagagaagttaagccttgtcacgccgatggtactgcgtcacagtgggagagtaggtagctgccgtttttgattgaagcctccggacttgaagaagttccggaggctttttttttgcatccacgtgtgaaatatgacctctactattgctcatctcccaattatggattacttttgcccataacctaaaaataatacgtcaatggatacattattaccatttgcattactatgctttacctcttttttcacattaaccaacccgttgggaaccatgcctgtatttttgactatgactaaaggaatggatgatgaagaacggcgtcatattgtgaaacgcgctactatcatttcctttattacacttctggcttttactttctccgggcaatttttattcaaattttttggaatatcgaccaatggctttcgtattgctgccggttttattattttgaagattggatatgatatgttacaggcacgttttactaatactaagttgaaagacgaagaaattaaaacgtatgccaatgatatttcaattaccccattatctattcctatgctttgcggtcccggtgctatagctaacggaataatgttaatggatgatgccaatacttggactatgaagggggtattgattgggatgattggtttgatttattttatcacttatcttatattgcgggcgtctacccggttggtttctattcttggcgaaactggaaataatgtaatgatgcgtttgatgggacttattttgatggtaatagctgtggaatgtttcgttagcggacttcgtccgatattaattgatattatccaatcaagtagggtttaaccaacgaaagaatgtgctgaaagtagaatatgattatttaattcactttgagcacattctttgtatctgggtgctggttattagtcaaattcaactaatatacggaatacttttccgggggctttcgcccactcttccatagcttgtagtgcggtttcgggtttggctactttgctgattaattcatcctttggacaagtaccttgctccatatagcggataactgccctgaaatctgcgggtagtgcattacgagaacctcggatatcaagctctttctgtacaaaatatttagtctgaaaagacacctctgattttgcataacctatgcatacgacccttccggtaaatccaacttcattgactgccatgacataggttgcagggctgccgacagcttcgatgaccacatcaggaccaaatccttctgtaatctttgtcaagcgttcgtgtacattctctgtcatggagttgatggtgtggtgagcgcctacccgtttggctagttccaatttttcatcgtccaaatctacggcaataacggtagctccacgaagagttgaacgtacaatagcacccataccgatcattccgcagccaataatcataactgtatcgatgtctgtaacttgcgctcgtgaaactgcatggaaacctacactcattggttcgattagtgcacaatcacgaggagaaatatggcttgccgggattattttgttccaaggcagtgcgatatattcacacatggcaccattacgctgtactcccagggtttcgttatgttcgcaggcatttactctgccgttacggcatgaagcacattttccgcaattggtataaggattgactgtgacgctcatacccggttttaatgattctggtacatccttgcctatggcttcaataatagctcctacttcgtgtcccggaatgacaggtagttttaccattggattacgtcctaaaaatgtattcaggtccgagccgcaaaagcctacatatttaatttttacaagaacttctcccggtttaagagcgggtttctcaatgtctactaccttcatctcggaaggagcagtaatttgaattgctttcatcttctgtttatttttataagtttttaatcaattactttgtatcctttccaaccatagtaggcacaaaacaggaaacaaatcataggaatagcataagctatataataaatgtgttcgttcagatgcatcacataagcagtgagttggggcaagcaagcatttccaacgatggccataactagaaatgccgagccgctttttgtgttgctgcctaaatcagtcaaagcaagcgagaactgagtgggatacatgatagacatgaaaaaagaaatgcccagcatggcataaagacctgtccaaccgccaaaacaaaccacaacaatacatagcaagacattaatcagcgcatataccaagagcatgtcttgtggacggaattttaccatgagtagtgtgcctgtccatcttcctgccaaaaaagccagcatataaagaccgaaaaaggtggtggctgtattttcaggtagttctgcataggtacaacagtagactagaaataaactgttaatggctgtctgaccaccattgtagaagaattgtgcaatgactccccaacgaaggtgagaacgttttaagactccgaaatcaattaatttttctcctttatattctactccttccatcgtattttcttctttgattttaggtaatttggagaagataaagatgatggcaataacaatgagtaacatagctagcagcagataaggaagtttcatggcgtctgtttctgtttgaatgtaaccttcccagccaccgggaaaagaagcgggcagggtgttgcgggtatagtggttgccactcagaatcagtttgctgagaaacatggcggctataaaagctcccagcccattgaatgattgtgctagattcaatcgacggggcgcactttctggatctcccaaagcggttacataaggattggctgctgtttctaaaaaacacattccagtggcaatgatgaagaatatacatagatatgcccaatattctttcagcatagcagcggggaagaacagtaacccaccacatgctgccagtaataacccgaaaataattcccgatttgtagctgtattttttcatgaacatagcgatgggaatgggacagatgaaataggcaagccagtaggctgtttctgtgaatgatgcttcgaaagcgtttaactcacaggttttcatcagctgtcttatcatagtaggtagtagattgctgctgatagcccataggaaaaacaggcagaatatgagcatcaatggtacataataggtcttatttttcatggtatggattaataagtgtcagttgattattctgacatgtttttaatgtaaggaagagatatgagatttttgaaaccataaaatctttcggcgtttttacctaaaaaaagtgctttctcttcttgtgtcatttcagtcgttttaaggatgaaatcgtaagacatcttgtaagtaatggccgtaatggtccgcgggtaatccgatccccacatcagtttgtccataccgaccaaatctgctgcttctttgatagccttcaccgctcctgcaaacgggtagaattcactgttgaacaaccaggtaatgcctcctgactctatcatgacatgggtatgccgggccagttttatttgttcctgccaatgaggagttgtaaccataccgaaatgtccgatagcgatttttagttgcggacattcctggataatttctttcatctcctgcacttgcgtgtttccatcggctagatcaatggaaaggataatgtttttatcttccatgtaatggaacatttccatcatttcgtcacagttcagcatgactcttccttcttttagaaaaaggcggtgtgctgggatttttattgctttgaaaccagaacttattaattccttggcctgttgcagataaccgggtttacgaaattcgcacataccgcatacaaagaaacggtccgggtatttatgggccacttttgcgaggtattcattttggatgccatcaataaattcctgagtgactacggcagccgatacttgtgcatagtccatgttcgagagaaaaacctcggcactattccgcccgtcaatcataaagggcggaaccatctgacgttcttctcccataaataacgaacgtccgttggttaaagtacggataggcaatccgttgacttccgtattttgccgtaaccaaagatgggaatgtgcatctattatgttaaaatccatcattattctcctttgtattatgaattagcccaactgacacgcatttgttttccgataatttcttgtacttcctttacaaggttccaatcgatgggttcttcagcgtatgttatatttttcaatacattatctggattggccgaactgaacaaagtggtggcgatacgtggattgctgacagaatattgaatagccagtttctctataggataatttttggacaggcaatgttgaacagctttccgacaggcttctaccagtgattggggggccggatgccatgcaggaaccccacgttgggagagcaagcccattgaaaggggggaggcattgatgatgccgatattctttgattcaaaataatccagataatcagtcagtttctcgtcattcagacaataatggcagaagttaagtacgctttctactgttcctggttccgagtgatcaatgacccattttaagttttctaattgcaaatctgtgatacctacatgtcccacaatacctttctttttaagttctaccagtgcaggtaatgtttcgttgactacctgattcatgtctgaaaactctacatcgtgtacattaatcagatcgatatattcaatgtggagtctttccaagctttcataaacgctttccgttgcacgttttccggaataatcccatgtgttgattccatcttttccatagcgtcccactttggtagagagataatatttgtcacgtgggatttctttcaatgctttgcctaatacggtttcggccttgtagtgcccgtagtagggagatacatcaataaaattcattccattctctactgctgtgtaaacagctttgataccctctgcttcgcggatatcatgaaaaactcctcctaatgaagatgcgccgaaactaagattggaaacccgcataccggttttcccgatttcattgtaattcatagttctatttatttttagatttatttccggcatcaaaaatagaggaataacctttaggtatgtggtggaagaggttgaaaaaagtacgtaaacctttgcgtaaaaataataagacggttactttttatatagttctctatattgctgaggagtaacgcctgtgatttttttgaataagcggttgaaataagaatggtcttcataagcaaggagataagctatgttttttacaggaatatcctctgtaatcagaattaattgggctttctctatttttttctgattaatatattgcagcggtgtgttaccgacttcttttttgaaaagacggataaaatgatcttttgagaggcatgagattgctgccaatgagtctatatctactgttttatagatattttttcggatgtgggacaagactttttggatacggttatcgttgacttccactttaggtttggcgtcttttaaaaagcgggcaataagttgatatactatacctctggattcgactttgtcacagaaggtacgctgtttatttttaatgatgtttctgattaatgtggggttgttgtcatagcttgtcgggtcggattgaggaagctgcatggtaggatttatttcacataaccttttaataagtggtaattccaggttgtccgcaggtatttctatcgggaaattccaatcttccagaatgccggattctgattgatggtcttcatatatatggagataataatgagtgaaatgagaattgcactgataactatgggtagtgaatgatggcaccagatatagatgatgtggttttagttcctgtattccgtcgggaaatattatttgggcagttccttccattatataatagagtctggtaaaagggctgcttacgtttttccagttccagtctgcattgtgaatggctagtcctacatttaatataagtaaatgtaattggtcgattgattgtgtcatattccttaaggtattagaatgaaagattcagtttcgtacaaagtaagcaaaagtatatatataatccaatgggaaatcgatattttcatatcaaatcacctgttttggtattcgtttttgaattatctcaggtaaaagtcgatattgtcctacataatggcgcatttggataatataaattggtttcaactctgtatatttgcactattgataattgaaaaatatataaagcaattatactatgaaagcaaaacattttcttttggcttcggctttgttgctttgggcgggagttttggaggctcagacttaccaggtacctgtttcagagaaaaatgaaaaaatgcaggaaggagagttcgaacctacttgggaatcattgcagaactataaagttcctgaatggtttagaaatgccaaatttggtatttgggcacattggggaccgcaatgtgtggaagggtccggcgactggatggcgcgttctctctatttggaaggttcgcgcgagtataagcaccatgtggaacattatggccatccctctgaagtgggcttcaaggatatattgcctttgtttaaagccgagaaatgggatccggacaaattggtttccttttataagaagattggtgcccagtatttcttcgctttaggtaatcaccatgataattatgatttatgggatagccaatatcaggaatggaattccgtgaatataggtcctaagaaggatatattggcgggctgggctgaagctgcaaagaaaaacggtcttccatttggtatcagttttcatgcggatcatgcgtggagctggtatgaaccggctcaacgatacgaccgtcatggcgagaaggcaggtgtaccctatgatggatgtttgactaaagaagatggtaagggtaagtggtgggaaggctacgatcctcaaaaactttatgcacagaatcacccgttaagcgctggaagttgggctgacggtatgattcaccgtcaatgggcatggggaaatggtgtttgtattcctactcaagaatatgtgacaaacttttatgatcgtacaattgatgcaataaaccgttataatcctgatttgatttattttgatgtgactggtgtaccgttttatcctatcagtgatgcgggtttgaagattgccgcacatttttataatcacaacatggttgctcgtaagggggatttcagtgctgttatgtttggtaaaattcttaccgatgagcaacgtaaagctttggtatgggatgtggaaaggggatctcccaatagtatttatgaagagccatggcagacttgttcttgtttaggcggttggcattatgataccagattggcggagaacggttggtataagagtgcttccgatgtagtgaaactattagtggatgtgatcagtaagaacgggaatttgttgcttagtgttcctcttcgggctgacggaacttttgatgaaaaggaagaagccattttaaatgaatttggtgactggatgagtatgaataaagaggctatttatgatacacgtccgtggaaagtcttcggagaaggtccgatagccaatgctgatatcaagattaatgctcaaggtttcaatgaaggtgcttacactaaagccactgcatctgaaatccgttttactcaaaccaagaaatatctctatgctacagtccttgcatggccggaagaaaagcaagttgtcattcaatcgctggcaacgggaagtgagttgtaccctgataaaattactaaaattgagttgttaggttatggaaaggtattttttactcgtacagcgcaaggagttgttattgatatgcctgatgtacagttgaataagattgctcccgtatttaagataaagaagtgaatatagcataaagtaggtttatttatcggcttttttaggtcggtaagcccttgttatgtcttgaaaattaacccaataatcaatagaataatgaaaaacagattagaatgtatgcagtcaataagattcttggcggtcttgttgatgtgttgcctgagctatactacttgggcacagacacagagtaatgtcaatggtttggttactgatttttccggtgagccgttaattggggtcagtatcttggttaaaggtacttccaatggaactgttactgatttggatggcaaattttctctgtctgctgaaatgggaaacatgctccagataagttatgtaggttatatttcgcaagaagtaaaggtggaaagtgacaagttacttcgtattataatggaagaagatacaaaaaagttggaagaagtagttgtgattggatatggaacacagaaaaaggtgaatttaacgggagccgtagctgctgtttcagctgaagacttggctagtaaacctgttatgagtactgctcaagcactggcaggtttggctccaggtttaagtgtattgcaaacttcaggtcgtcccggacaaggagcaactgttaaaattcgtggaactggtacattttcaaaagctggcacagatccattggtcttgattgatggtttatcaggtaacattgatgatgtagatcctaatgatattcagagcatttcttttttgaaagatgcagcttctgcttctatttatggtaatcgtgctgctaatggggttatcttgattgaaacaaagaagggtgcacaaggtaaaacgactattacatatagtaattcttttggttggcaacagcctacggaattgcctgattttttaccatcatgggaatatgcggaatattataatatggctatgcggaatatgggtaagcaggaagcttatttacctgaacagattcaaaagtatagagatggatctgatccggataattatccgaatgtaaatcacttaaaatggctgttggaatccggttctggttttcaacaccaacataatcttagcatacaaggaggaaatgctacgacgagttataatttatcagtaggttatagaaatcaggaaggaatgacggcaaaaacgtctaatgaaagaatgactgcactgtttactatgaaaagtgaaatcgccaaagggctgatgcttaatttgaatattaatgcttataataataaatataatgctcctaatggcgaaccacaaagtattgatggaatgataggatatgctgttcgtcagggacctatttatgccgggcaaaagtcggatggaagttttggatatcaggataattatagtccggaagcgtggttggcgagtgaatcttttgtgcagaatgtgagtagaaatataagtgcttccggacaattgacatggaatactcctgtagacggactttcttttataggcaaagtagggatgaattactggactaaatatgataaagcctaccgggctgatacttattttgatgatagtaagacagtgggacccgctactttaaatgtatggactgcaaataatacgtatactacttttgaagcattagctacttatgaaaaacaaattaaaaatcatacctttaagttattggcgggtacttctgtggaacaatctaataataaaggtttggaaggttatagaaatacgtttcctaataattatttgtatgaattaggttctggagataaatcaacagctactaatgatagttcattggaagaatatgcgttgctttcttttttcgggcgtataaattatgcatggaaagatcgttatttattagaggttaatttgcgctatgatggatcgtcacgttttgcggacggtcatcgttggggacttttcccctcagtttctgcagggtggagaatctctgaggaggacttttggaagaatgcggcagtttcagctgtagttgataatttgaaattgcgtgcttcctatggtgtacttggttatcaaaatataggtgtttatccttaccaacagatttatgaacttggacatgattatccttttggaaatccggcaactcttcagtctggggcttacatgaaaacctataataatccggaaattacttgggaaaagacggctataacggatattggtttagattttagtttattgaatggacgttttagtggaacattggattatttttataaatatacttcggacattttagcacctgttgaggtgtctagtattatgggacgtgaagtcggacaatctaatgttggagctgtttcgaacgaaggaattgaagtaaatctgacttataacggacaaataggacgtgatttccggtttagtatttctcctaattttacatgggtaagaaatgcagttgagaaattggcaaacggagctaccgaagaaattaataataacagaattgtagggcaaccgataggtattatatatgggtatgaaactgatggactgtttgtagaccaggcggaagtagatgcggctaccgaacaattggtaagtaagtcaggactgaaacctggttatgtgaaatacaaagatattagtggtcccgacggggttcccgatggtaaggtagatgcgcaatatgatcgtaccgtattgggaagtactaccccgaagttttattatggtttgaatctttccacttcttataaaggttttgatttttcagctttgttacaagggttaggaggtcataagcgtttgataggatcttatatggcttatgcattctacaacggtggacagatacagagatggcaggctgaatcttgttggaaggaagaaaatcctgataaatgggctgaataccctcgattggaaactttgaatatgaacgacactaatcttcaaacttctgattattgggtccgtaatgctagtttcttacgagtaaagaatatacaaataggatatacattccccaaagcatggactaaaaaaataggtttggaaaatgtgcgtgtttatgtaagcggacaaaatctgttttctttcaatagtttctataaaggttgggatccggaaaatgagataggaacaggggattctccctcttattatccggtcaatagtatttattcattcggatttaatttcaaattctaagtaaatcattcaattaagaatcattatgaaaaatatatataatacattaggaatgacaaaggcttgtttatgtgctttggctatatcactagtaacaactggttgctcggatttattagataaggagccaccttcagcaatttctgatggtagtttttggactggtgaaggggatgccatgttggcattgacaggatgttatcgtttccagactggttggtcgcatgatgattttgctacgccacaagggttgttttatttggattttgcaggtggaaatggaacagaaaaggaaaatttttctactttaatggctagttccaatacggtggctactaatggcaatttacgttggtattggggaaatgcatatacgcaaatagctaagtacaacacttttctagagaatattacggattgtccgatggaagaatctaaaaaagaacagtggtctgccgaagtgaagtgtttacgagcttatttctttttaaatttggcattttattataaggatgttcctatgcctttgaaaactctgtcggtggacgaagcgaattctatttctcaaacacctcaggctgaagtctattcgcaagtggagaaggacttgaagactgctatagacttgttgcctgtccaatattcctcagaggaatatggccggtttactaggggggcagctaaggtacttttaagtcgtctttacttagcgcaagagagatgggtagatgctgctactgttttacgtagtgtgattgattcgggaatatatgaattggatcgtcgtaatggagaggacagctatgagaaactttttcaaataggaggtgaatatagccctgagataatattttgtattatggggataaaggatctatatactaattcacgttatcaatatttatatcctgaagctgcttatggagggtggcatcagttctcaccatataacgaattagtgaaagaatatttttgtgcagacggcaaggatattaagacttctgaggtttatgatgagaatgatccttatgttaatcgggatttgcgtttgtatgcttctatttttttacctcctttgggaagttatgagggaactaagtataatgatataatttatgattgctttaagggggctaatactgcagatagctataataagtttgccttatttaatggatattgtccgaagaaaggttgtgatccgtctataactaataatttaggttctactcccacttatactcctataatgcgttatgctgaggtcttattaagctatttggaagcggtaaatgaatcgcagccgaatgcagtagaccagaacttattagatctgactattaatgatatacgtgatcgtgtgaaattggttggaataaaaaagacagacgtagcaacacaggaacttgttcgtgaagcggttcgtaaagaaagacgtgtggaactggcattcgaggggcttcgatattatgacgtgttacgttggggcattgccgagaaagaacttaatcatacttttaccggagtaaaattgtcggatgatccgcaagctcgtaattatagaggaagtggtgttacggcttctcctgtagatgaagatatgtattatcagtttgaaaaacgtacatggtctgcacataaccgatattttcctattcctcaaaatgatttgaatgtgaataaaaatctgaaacagaatgaagggtataattaagcaggcataagtttaagataagatgaaagaaaatggatatgaaatgaaaagatatgactacccggtaaaaagatattgccagacaatggatttgaaggatgatccggagatgatagcgaagtatcgggagtgtcatagtaaggcgaagtcatggcaggagatcagagaggggatccgttcagttggtattttagaaatggaaatatatatatgcggtaatcgattgttcatgattgtcgaaactcctattgattttgattgggaatctgctatggctaaactcgcgactttacctcgacagcaagaatgggaagactttgtatcgatattccaacagtgtaggaaaggggaacttgctaaagaaaaatggagtatgatggagcgtatgttctatctatatgaataatttgaaaagagagggaactgatgaagtattctctttttcctcaaaatataatagaaggcatattgaataatttagtgattaaaagattgtacaatggcgtgggatagaaaaagaaatgcttgttttatcaatacccattgcttatcatcggaaagccaataagttgataaaagtgggtgattggtagtgttatcaatactgaaatttttgagccttcgtttcttcaggtatagacaaaaaccctcgaaattatctaatttcgagggtttttgtctgtttctatatggaatgttgtgcgcgtgataggactcgaacctacacgtctcacgacaccagatcctaagtctggcgcggctaccaattacgccacacgcgcgaattgctttcggtaagcgggtgcaaagataaggaatatttcttaagtaccaaagatttttaggaaattattctttgtggttatgtaaatattcacgtgcagcctcaataattgtatccacattgcgttgcatatcctctgaggtcatattgactttgatgtccggatctataccaaattccagatgttgcatattcgcatcgtacattggactggccgagaagcggacagaccagccattgggcagttcagaagagaagggcagaccagaaccgccacctgttttgtcaccgatgatggttactttgggtagtattttcattctgttcacaaaatcattggtggcgctgaaagagcggcggttagtcagcactaccgcttgtttttgccagcgtacgcgatctagtgacggttccagccaaacagctttaggagttgagaaatcattgtgtcccggtccggttttatgggacatatagcctaccaacactttttcattcgtgaaacgtgcggctaatttctcggctgtggtaaggttaccaccggaattgtttcgcacatcaataatcaatccatcgcaaatagccagcttgtttagaatctcgtccagatttccttcgccgatacctgattggaaactgccacaataaatataggctatgttatcctcgaatacctgatacttcatgcctgaggattgggcatagtccttacctagatagacacgttggatgctgtcgctgaaattggccggatagctgtcaaaccattcacgatattgggagtactccagtttggaagacagatttacgtgtccgtcacgcaactcgttcagcatatctgccagaacttcgaataactgttcattattcatgccttttgatattctctgtttgtactggctatatatttcattccagtccaatccgtattcctgctttttatagtcaaggaaacaatactggcggtcgatagtctgccataacgcttcgaagttgccttcgggggagttgtcgtattcgtcctccgtgatgcacgaagtaaataatacaacagacaataacagactgataaaaaaataactatttcttttcattctctatattaataagggctgacccggctgggcatcgccactttgttcttaccttttaataaatagaagtttttcacgaaacctatcataaaggcgtgtgaccatatatgacttttcagattattgactttcgcctgctggatatcacataggtatccgaaacgcatattgactgaccggataggaaaatccaatgtaaccaattgccgcaaggaaggttggttatgcagggaagtgaacagcacattcttgccgccattctttaaactgaatatctcataataagattgtccgtattctggggaaaacataacccccatgacaggcaaattggcttgataacgggctatcagcggatagttaccgatatggaaccgatagatgaccatacccgatgccgccagattgacatatgctttggcttgggcaggattattagaatttcgcatgttatagatgaatccgccgttcaagtccagcatgggacccgccagtatcttcaagttttctgtcagccggaactggtaatgcagtgcataattccaattgaccatacctgacatttcgttacttgtttctgctttattctcagtcagggacagattggcttggaacagactttgaacagatacgttgccattcatcagtttggtcatgcgcatactttcacgcaggatacgaatttcgggtccggtatattccatcggtgaaagataggtgtccaatatatttgtaaaaccgacaccgtaaagagtagccctcataacgtagcggtttgctcgtaagctgtcttcctgagcctgtgaaggcagaccaagaaacagggacagtaataataggagaatttttttcatttcttaaaacagtttcatctggccggtaatttcatcaatgatatctgtttcactcttaccatgatccggatcttcaatttcagcagcttcttcatttttatcagtcccctcttccgcaccgtcctcttctttgggaggttcgggaaaacgtaaaggctccagctcgtttatttgttcaatgttgtaagtactgattcgttttcctttcgctttgaaactcttaattccgatgaattcgtccacatctatttccaatggatcacggaaactatcatgtcctccgaatatgacttgtatgcgtggataaaccacacaagtaagcaatatagaacggctttccttgttctcgcccaaataattgagacggcgtgaagtggattcaaaagtgaatcgtttcagataaggatatccctgatcggcatcaaataaagcggcagaccataccttgttggcgtcgaacttctcaatgatgcggattcccggatcataatgattattcaaatcgaagttactagtatagaattctccattttcatggactattaaaatcaattcgtcactttggaattctcccagatattcaccgcgtccgtcatagttcaagcggagcacatcccggtcaaaccatacttttcttccacccaaagtagagccgccacgttgttttaaggctattttatgtacttcgtatttagacaggatattgcccatggactggcgtcccttgatattgatgtcactgaaatctttttcatatatgatttttttgatacgtggattcggttttaaggtaatcttgataacctctgcttctccattaggattggctgtaaagtaaacaatacgtgagccgggtgtaccttgcgttacatcatattcacggtcacgggtgatggaggtaatgttgaaccgtttgatatagtgaaacccttcttttccatcccgataaaccacattgtatatggtacgtttgtcgtttttcttgaagatattgacatagagaacattcttgccgacaaacattttgtctgttacgcgaactactttatatttgccgtctttatagaagataatcacatcgtctatgtctgaacagttggctataaattcatcttttttcaaggtggtgccgataaagccttcttcgcggttgatatagagtttttcgttagcttccactaccttcgccgcctcaatggtatcgaagttacgcaactctgtacggcgggggtattgtttgccatatttatctttcaacatctgataccagtcaatggtatattctacgatatgtgccagatgattgtttatttcttcaatctgttccttgatacgggctatgttttcatctgctttatccttgttgaacttcagaattcgggccatcttgatatccaataacttcagaatatcctctttggtcacttcacggataaattgcgaatagaaaggagtcagccgttcatcaatgaactcgcaggcggcgtctgtattttcggattgctcgaactttacttccttataaatccgttcttcgataaagattttttccaatgatgcgaaatgaaggttttcaagcaattctcctttgtgtatttccaactcttgacgaagcagggacaacgtgttgtctgtggcttttttaaggacggcactgacagtaaggaagtggggcttcttttcatcaataacgcaacaattgggggatatgcttacttcacaatcagtaaatgcatagagcgcgtccaaggttttgtccgaggatactcccggagcaaggtgcactaggatttccactttttcagaagtaagatcttctactttccgaatcttgatttttcctttttcactggctttgacaatagagtcgcatacccccgggacagtctttccgaaaggcacttcggctatggacaatgttttgttgtctattttattgattttagcacgtaccttcaccattcctccgcgttctccatcgttgtagcgggatacatcaatagagcctcctgtctggaaatcgggatagagtttgaattcctcaccacgcaaataggcaatggaggcatcacacagttcgttaaaattgtgtggtaggattttggaagaaaggcccacagcaataccttctactccctgagcgagcaagagcgggaatttgacaggtagggtgatcggctctttgtttcgtccgtcgtatgacgcttgccattcggtggttttgggattgaaaaccacgtccaatgcaaatttggatagacgtgcttcgatataacggggggcagcggcaccatctcctgtcagtatgttaccccagtttccctgacagtctattaacagatccttttggcctagctgtaccaacgcgtcgcctatggaagcatcgccgtgcggatgaaactgcatggtatgtcctacaatatttgctactttgttatatcggccgtcatccaatcttttcatagagtggaggatacgtctttggacaggtttcaaaccgtcattgatgtgcggtacggcacgttccaatattacgtaagaggcatagtccaaaaaccagttctgatacattccactcagctggtgcttcacccctgtgtttttggtatcggtaggtttatagtccgagtgtccgttctccggtgtggggatattttcttcgttttgttcctctttatcaataaaatcgtcgctcatatatatttaaattccttaatgttctgatgatatgcacgcaaaaatacgacttttattgaaaaaaatcatttactttgcatattatttcgcccttattaaaggttgaaaacaggaaaaaacaacaaaagtgtaagaataaacagataagaaaatggcacaagaagatgtttttaagaaattagtatcgcactgtaaagagtatggttttgtatttccgtccagtgatatatatgacggactaggcgctgtatacgattacggtcagatgggagtggagttgaagaataatatcaagcaatattggtggcagagtatggtgctgctgcacgagaacatcgtaggaattgattctgctatttttatgcatcctactatttggaaggcttccggacatgtggacgcgttcaatgatcctctgattgacaaccgcgattctaaaaaacgttatcgtgccgatgtgctgattgaagaccagcttgccaaatatgacgagaagataaacaaagaagtggccaaggctgccaagagattcggggatgcttttgatgaggctcagtttcgtagcaccaacggtcgtgttctggagcatcaggccaagcgtgacgctttacatgaacgattctcaaaagctttgaacgacaatgatttggatgaacttcgtcagattatcattgatgaagagattgtttgtcctatttcgggaaccaagaactggactgaagtacgtcagttcaatttgatgttctccaccgaaatgggttctactgccgatggtgccatgaagatttatcttcgtccggaaacagcgcagggtatttttgtcaattacttgaatgtacagaaaaccggccgtatgaagattcctttcggtatcgctcagattggtaaagctttccgtaacgagattgtagcccgccaattcattttccgtatgcgtgagtttgaacagatggagatgcaattcttcgtaaaacctggtactgagctggagtggttccccaaatggaaagaaattcgtttgaaatggcataaagcattaggtttcggtgatgatcattaccgtttccatgaccacgacaaactggcacattatgccaacgcagctacagacatcgaattcctgatgccgtttggattcaaggaagtggaaggtattcacagccgtacgaactttgacttgagccagcacgagaagttcagtggcaagagtatcaagtatttcgatccggaattgaacgaaagctatactccgtatgttattgaaacatctatcggtgtggaccgtatgttccttagcattatgagtgctgcttatacagaagaaacattggaaagtggtgaaactcgtgtcgtgctgaaattgcctgctgctctggctccggtgaaactggccgtgatgccgttggtgaagaaagacggcctgcccgagaaggcgcgtgagattatgaatgacttgaagttccatttccactgccagtatgatgagaaagacagcatcggcaagcgttaccgtcgtcaggatgccatcggtactccatattgtatcactgtagaccaccagactttggaggacaattgcgtaacattgcgtaatcgtgataccatgcagcaggagcgtgtggctatttcggaactgaacaatatcattgccgataaagtaagtataataagtctgctgaagactttgcaataataaacaggaatttatgaataaaagtattctttggctgattagtctgctgtttgttgcttctctgtccattgtttcatgtagtgaatcagatggaacagaagacccgtatgcaaactgggaggaacgtaatcagagatatattgactccatcgctacagtggcggaagctaatcaaggcaatgaggtaggacaatggaaaattatcagatcgtataaacttcctcctttgggattgaatgaaacaggaaaggtgaatgataatgtttactgcaagattgttaagattggtgatggtactacaagtccgattgccacggatacggtagcggtgaattatcgtggtcagtttattaatggaacagtctttgaccaaagttatcaaggagaacttgatccggaaacagctactccaaagacatttgttgcaggtggggtgattgccggatggagcactgccttgatgaaaggatatggaggtatgaaagtaggagatcaatgggaactttatattccttatcaattgggatatggaaaggatggatatagtgatattcccggatattccacattgatatttaatgtaaatttggttggcatatcaccgttgaaaggtacggaaagaagtgttgatgatgtattagttgctgaataaacagctatcataaaagattaaaacctcaaatccgcaactacgcgcctaatatgatacagaagcgaaaagaatctgcatcgttagtaaaaagggggcacagtgcatcgaatgtcaccataaagacatataaatgccccttaccccaccatgcgacttgaggcaatacgcaaaatcacgactataagttgtcggtgttatccaaagtcattctggaacacattggcataagcattgttgcatgaatagatattcagcacatacttccttgatgtcctgacccatttggctggcacagagatgaacttaaagacaaacgtcttgatgcggcttgttgctttgagtccgaacctcttcacgtcaagcctcgccatgatgaatttatagaagttgcgtatgagtgccataagcagaagaaacaccgtgttttctcccataaaggattttggaagcctgttccagccgaatccgttattcatatcatcgaagatgcgttccttccctccacggaggttatagaattcgacaatctctttctcggaagactcgtagtcatttgtaaggatgcagcggtaggtgtattctccttcccacaggtcgagttcgccgtctatccgcttctgtctttgaatcacaagacggtatgccttccctttccatttctcgatgagaatggaggccagctcaaactcaatgccgcccaattccactttcttccaacctctgagggcaaagatgtcattgtagagcgaactgcatcggttagcacggatatagaaggtcttgcagtgtttagcaatctcttccactatctcttcagaacacgagccgcaatcagctctgaaacggttgataataagcttgttttgttcaaacctttcaaagaacctcttcagcgtgtccttctggtggaaacggacatttgtgttgccgtcgctgttctcaatgccgacaatcaagttgccaataaccgccacgccagggcgataaccaaggaacttcttgtatgtaggcttcgcatcaaacttctcagcctctatgaactggtggtcgaagtcaacgtcatacccctcgccctctttcagctgccctgtggacaataggcaattgaggagcagtgtattcagcttgtctgccgtgttgaagtcgtaggtcttgccagtgtcggatgtgtaggaaatgttatcctgggtcagttcctttatggctctaagaatcgtgtcggcactgcatgtgcgaagtgtcggatgaagcgaaaggtggtacatcagatgagtggtgacatcctcgatgcatgagccgccacaaaaataaacgctcataagcgaacggatgatttcgctgtattgataaccatacagcctgcatctcataccgagggttgagtcgattacagatgagagtctggagtcaaattgctccattattgaaaatattcctccaaaaggagtgagtttctcggatttaattgctacctttgccatgtctgtcgggtttgatacatattttgatttgcaacactaagataggtgaaaaatctgacatggcaaattcctgagcaactttttgttgctcaggtacttaaaaagttatatttgtaatagtgttgcggaattaaggtaaaaggagtattgcagttattgtgatactctttttttatggatgatttgagctatggcagttgaatgaatcgggttttatttgacgatcttgttttcttatttgtgggacaaaccatttttttgtttgctgaaatgttttttggggtatggactaactgtttttcttcatatggttaagtgctttatatgcccgcttgctacgttccattatctgtaaagaatggtttaaaggtcgggggataaaaggcttataaggcttattatatcaaaaagaagtcttgacgggaacaaggagattgttttattttatcggggacagaataaaaaacttcgtcctttgggtattcgaggtgttttttctttcagcataatgttgtggggatagtttgacggacgaataactgtaataaacgatataatctttatcttggtcaattcattaaatcaatgattggcgcaaagataaagattataaaaaaaattatttcacaaattatttcatgtttcctactttgatcaagtattcggcaatctgaacagcgttcaatgccgcacctttcttaatctgatcgcctacgatccagaaagtcagtccgttttcgtttgccagatctttgcggatgcggcccacgtaaaccggatctttacctgccaggaacaaaggcatcggatattctttcttttcgggattatccatcaataccaggccttcacctttggcaaaggcttcacgggcttcttcgggagaaatggggcgttcagtttctacccagatactttccgagtgagaacggagggcgggaacacgtacacacatggcgctaacctgaatgtcggagtgcataattttgcgtgtttcgttgaacatcttcatttcttctttggtatatccattgtcggtaaatacatcaatctggggaatcaagttgaatgccaactgataagcgaatttctctacagtcacgggttcattagccaatacctgacgatattgttcatacaattcatccatagccgctgcacctgcaccgctggcagcttgataagtagccacatgcacacgttttatgtgtgaaagattttcgatggctttcagtgcaactaccatctgaatagttgtacagttgggattagctatcacgttacggggacgattcaaagcatcttccggattcacttcgggtactaccaaaggcacatcggcgtccatacggtaagcgctggagttgtcaatcagtacggcaccatgtttggtaatggtttcacaaaactcttttgtggtacctgcgccggctgatgtgaaagcgatatctacacctttaaagtcatcgttgtgctgaaggagtttcacttcaatctgtttaccgcggaatgtgtattttcgtcctgcactgcgtgaagaaccgaataacactaactcatccaacgggaagttcctttcatcgagcacacgcaggaactcttgtcctacagctccgctcgcaccaacaattgctactttcattttgttttttgttttataagataaaatttagtaatactttagaactatctctcagcatgtaagtatgttctgcgtgcaaaattagaacattttagaatataaatcagtaaaaaagaaagttttttcgtaattttgtcgatataatggtataaaactcaaaaaaagatggaattattcgaccttaacatacattttccggtcacagatcctacctggatattcttcctggtacttattatcatcctgtttgcccctatgattttggggcgtttacgcattccgcatatcatcggtatgatacttgccggggtagtggtaggcaagtatggctttaacattctggaacgtgacagcagttttgaattgtttggaaaggtcggactttactacattatgtttttggccggtcttgagatggatatggacgatttcaagaaaaacaggacaaaaggattgatctttggtatgtttactttcctcatcccgatggggctgggcatatggagcagcatgagtatgctggactatggatttttgacttctgtgttgctggccagtatgtatgccagtcacaccttgattgcttatcctattatcagccgatatggcttgtcgcggcaacggacggtcagtatcactattggtggtacggcggtgactgtggtgctagctttgatggtgctggctgttattggtggtatgtataaaggtgaggacgtaggcggactgttttgggtgctgttggttgccaaggtagttttgctgttcggacttatcatatttttaatgcctcgcatcagccgatggtttttccgtacgtatgaggatgcggtgatgcaatttatattcgtgctggctatggtgttcttgggcggaggcttgatggaattggtggggatggaaggtattttgggagctttccttgccgggttggtattaaatcgttttgttcctcatgtctctcctttgatgaaccggctggagtttgtgggtaatgcgctgtttattccctatttcttgattggggtggggatgattattgatgtacgttgcctttttacggaaggtgaagcgctgaaagtggcggttgtaatgaccgtagtggcgacattcagtaagtggctggctgcatggataacccagaagatatatggaatgaagaaggtggagggcagcttgatattcggattaagtaatgcacaggctgctgcgaccttggccgctgtgttgataggtcatggtattattatggaaaatggagagcggttgttgaatgatgatgttttgaatggtacggtggtcatgattttgttcacttgtattataagttctgttgtgacagaacgtgccgcacgcaaaatggtgactcaggaaaatctgatggagggcagcgaaggtaaggaacaggaacgcatcttgattccggtagctaatcctgaaaccatagaagggttggtaggcatggctttgatgatgaggcatcctaaacaaaaagagtcattggtggcactgagtgtgatcaatgataataatacttcagaaaccaaggaactgataggcaagcgcaacttggagcgtacggcgatgattgctgctgctgccgatgcgtctgtaaagactgtgttgcgttatgatttgaatattgcgcaaggtattattcatacgcagaaagaatatgcggtaacggatattgtaataggtttgcatcgtaagacgaatttgatggattctttctttggtacaatgacggaaaacttgttgaagggtacgaaccgccagattatgatcgctaaattattgatgcctgtcaatacgttgcgccggattgtggtggcggttcccgataaggcggaatatgaaaaaggtttcttgaaatggatgacacagctctgccgtatgggtaaacaattgggatgccgcgtgcatttctttgctacagaagatacattgaagcatttgcgtgccctgacagaaaaacaggaggcgaatacttttacggagttttctttattggaagagtgggatgatctgcttttattgaccggacaggtgaattatgaccatctgtttgtggttgtatcttcgcgtaaaggttccatctcttatcagacttcttttgaacgtctgccgtcacaaatcagcaagtactttgccaataacagtttgttgattgtgtatccggatcagttaggggacgatccgcaagagattgtttctttttctgaccctcgcggacaatcggaaacacgagtatatgataatgtaggaaaatggttctacaaatggtttaagaaaggtgatgaacgaaattaatatagagtggcagcaacgtacggagttgttgctaggaaaagataagatgaaacgcctgcgtcacgctcatgtgctggtggtaggtttgggtggagttggagcgtatgctgccgagatgatttgtcgtgcaggagtaggccgtatgacaattgtggatgcagacattgtgcagcccagtaatattaatcgtcagctttcggccctttactctactatgggacgtcccaaagcggaaattttggcggaacgtttccgtgatattaatcctgatttggaattgactgtattggtggagtatctgaaagatgagcgtattccggaattgctggacagtgcaaaatttgattttgtggtggatgccattgatacggtagctcctaaatgttaccttatatataatgtgcttcaacgtcgtctgcccattgtgagtagtatgggggccggtgctaaatgggatattactcaggttcgttttgccgatttatgggatacttaccattgcggattaagcaaagccgtgcggaagcgtttgcagaaaatggggatgaagcgaaaacttccggttgtatttagtacagagcaggccgatcaggatgcggtgatattggtagatgatgagaaaaataagaaatctactgccggaaccgtgagttatatgccggcagtctttggctgttatctggcggagtatgtgataagaagaatttgattatgatagaattacagggaataacgaagagtttcgggacattgcaggtactgaaaggtattgacttgatgatagaaaaaggagaggtggtaagtattgtaggtcccagtggtgcggggaaaactacattattgcagatcataggaacgttggataaggcggatacgggtactattttactgaatggtacagaagtgagttgtttgaaggaaaaagagttgtcggcttttcgtaaccggcagattggctttgtgtttcagttccaccagttacttcccgagttcacagctttagagaatgtgatgattcctgcgttgatagcaggtacatcttcttccgaagctatgcggaaagccaaagaaacgctagcttttttggggttgtccgaacgtgcttcgcacaaaccggctgaattgtcgggaggggagaagcaacgggtggcggtagcgcgtgcattaataaacaacccggcggttatccttgcggatgagccgtcgggcagtctggatacccgcaataaagaggaacttcatcagttgttctttgatttgcgtgataaattaggccaaacttttgttattgttactcatgatgaaaatttggctcgtttgacggaccgtactattcacatggtagatggcaggatttctttgaaaatttaatagagcagagatcagtttaatggtatatggatgctgtcattctgctctttccattggtctacttggaatcctccggtccctccttcttccagtagtacaccgtccatactcaggttgactgttgtttttgttccggcactaagttgtgtggttagcttttgttggtaatgctttaaatctccgtttttcatttgcacgaagacttggatcattggatttggctgggatgggaatacagatacaaatttattgctgaattcttttcgatctgcgttagggatcaacccgaaacgtatggttttgacagttccttccggttgggcggagaaataattcagattactatagatattgctgatataaatccacatagagtctatgctttcgctgaaagcgttaccgtttgtttcggtagtgattactcctaatgcggcggtagcacgaatgagatgcgcttgaaggtcatcttgaccgatattgatctcttgtgtgccgaatactaaatcgtgtacaggatagtaaacagtatctacggggacttttcgtaatcctaatgaagtgtcgagtaatttttctcctaaaattagggtagggtcgctcagtgcggcgtctgtagtattgaaaaaggtgggatatccccaataaatgatattataggtgcctgcgggcagtcttagaggggaatttttagattttcctattccgttttctatggaataatatgcggggacaggggtctgatttccggttgatgtgtaatttcctacataaatactgccatcaggccggcaaggtaatacttccaaaggaccgttataaagatcggtcgtattttgttgaatggtggcatataaggcgggagtcaccatctcttcaggtttgggattgcttctgtcataatcctcatctttaccgcacgaagctagcagtgccagtaaaggtaaaaataaaaactttctcatgtacatctttagtttaggtttgaatactccctataacaagatatggatgagaaagtttgaatggtgtagaagaaagttatgcttatactttctcgggaaaactggctttcaggatttcaaatgcccgggcataatctttttcgaagactagaacctttatttccattcccggaatataagccaaaacttgggctgtatactctccctgcaacatggattctataccttcattttttagaagatcctgtaacatgtgtgctcggacatcacttttgaaagaagtaagaataactgttttcatactcgttcctcctgtatcagttgtttcttttttcgatttacagttttgcagaatccggcgtgccacttctccagttacatcaccgtcctctccgtatgctgcgcctctctcattgaaccggcgtactatttcttcgatggtatcatcgcctattcctgcttcatccaaacgggtcttaagtcctaaatttctaaagaattcttcagtcttttctatggttagcgatactcgtacactgggaactcctgaagtaactccccagatacgttcgccatattgtagtattttgtcacgctttttgtcggcgagtgtccgtagagttccgggaaatacgatagccagtgtctggccgtgtgtcatgccatgtaatgcagtcagctcatgccctatcatgtgggtggcccagtcttcggatactcccatagcaatgaaaccgttcaaagccatagtggcggacatcataaattcactcatcaagtgataatcctgtttgttttctttgatttgcggagcgatttgtaccaatgtacgaaggatgctttcgctccagcggtccattagataagattcgtttgttttggtcatgtattgttccatgacgtgtacaaaagtgtctgccagtccgcaagctatctgatagtcgggcaatgagaaagttactgtcggatctaggatagaaaatacaggatgagaggagaaaaatggatatttttcatgagtttcacggcatgaaattacagctccgttattcatttctgaacctgtggcgggaatagttagcacagttcctaaaggaatagtattttgtgcactgccttttttaactagttcccaggcatctccgtcgtagggaataccagcggaaatcaacttggtaccgtctataactgagccgccacctactgccagcaggaagttgatgtttttttctttgcctgattctatagcttttttcagggtagatatatcaggatttgattctattccccaaaactccgtgtaatcacgtccttcaagggcttggattacttgttcatagactccatttgtttttacactgccacctccgaaagtgatcatgattctcttgttggccggtatctgttgggacaattgggcaatcatgcctttgccaaagatgaggcgtgtaggattgtaaaagataaaattatccataactaattggggttttctttgttaatagcgagtaaagatagtgctttttatttatctttgagaaaaaatttagctaatgaacgtaaaactgggaaaatacaaccagctggaggttgtaaaagaagtagactttggtgtctatttagatggaggcgatgacggagagattttattgcctacgcgttatgtgcccgaaggctgtaagcctggcgatgtgctgaatgtctttctttacctcgacaatgaggaaaggttgatagctaccactttacagccattggtgcaggtggacgagtttgcctgtttggaagtggcatgggttaatgagtttggtgcgtttttgaattggggattaatgaaagacctttttgtacctttccgtgaacaaaagatgaaaatgcagaaagggagaaagtatataatacacgcacatatagacgaagatagttaccgcattatggcatctgctaaagtggagcattatctttctaaagaacatcccgattatcggctggggcaggaagtggatatcctgatatggcagaaaacagatttgggatttaaagctattgtggaaaataagttcagtggtttgctttacgataatgagattttccaacctttagaagccggtatgcggctgaaggcttatgtaaagcaggtgcgtgaggatggcaagatagatttggttctgcaaaagttaggcgcaaagaaggtggatgatttttcagaagtgttattacaatatattaaagatcatgaaggtttcactccattgaatgataaaagtgctgcagaggatatctatgatgcttttggtgtcagtaaaaaaactttcaaaaaagcggtgggggatttatataaaaaacgtctggttgttttagaagctgaggggatacgccttacttagtggagcttttccctaccagatataggaaaagccctatgaatttatggggaaaatcaattgtgggggaaagtgatttcccctatttttgtgccatagaactaacaaactaaaaacgtaacagctatgaaaagatggactacattactgatagtgatttgtatgctaggtataactattcccgcaatgggggccatgagtatcagcaaaatgagacagaacactcgttttcttaccgaccgtatggcatacgaactgaaactcactccgcagcaatacaatgatgtatatgaggtgaattatgattttatcaataatgtccgttatctgatggatgatgtggtaagaggctatgattatgcgttggaacgttattatgattttttggatgtgcgtaatgatgatcttcgttggatactttccagtgcgcaatatcgtcgttttatgagggctgagcatttctaccgtcccatttatgcgcatgagaacaaatggcagttccgtatctatctggtatataataatgtgaattttttctactatggcaaaccgcatcactatgctagttattgcggagggcattatcgtactcatttcaataatgtcagttattataagatccattatcgtgaccattatcgccatgatgtgtacgacggacattatcgtatccgccatgatagaatgacgtatgatatgcaccgtcgtcgtgattttaatatagttgttcgtcctcctcaaaaggatcatcatcgcccagccactcctcctcaggctagtccaaacagacctcaaatccgtcctgacaggccgtcgggtgatcatcatcgtccgtctgttccacaggcaaggccggacagaccgaagaaggatcataataacaagcatgatgggcgcccttcacgacgtggacagaactcacaggttgataaggaccgtcatgaaaataggcgtattactccatccggcagggatgtgagaagaggaaatggtaagaaagagaaagattcggaacgttcaggaggaagcaataaaagtaattctaaggagagaactgtagtgcgtatgcgtacggtatagtatgatttgaaaaacgacgaaaattgacgtaaataagagttggagatacaatgaattgtccggattgtaaagatcatttttatgatgattcaccacaggtcaacgcagaatttgattatgaatggactgtgaaaatctgtggtgaatcttaagaaattattctaaagtaagaggaactcctttgtagaaatccagaattttggtacggaacagataatcatattttgcttgaagcatatccgaaacggctttcatccaattggtacgagcctcattgtattcagtagcgttggctttaccattggcatatttttcgctcatcagacggaaggaagcctcagaagcatccgtagctgtattactgcttttatatttgctttcggcagctactgcattatagtatgcttgctgtatttctttgaaaagagcctttttgctttcttccaacttccatgataaagcagtgcgctggatgcgtgcgttctttactttatttcgtgtgtcaaaacggttgaacaacggaatgctgagtgagaattgcaggtatttattaaaattttgatgccactgactgctgaatgaagcattttctactcctgaaatattatagtagtttgttcctatacctgcaccgaagtttaattgcggataccaggaactttgggcaatacggatacttttggctgcaccttccagacgaaattgggctgctttaatacttggtttgttcagaacagcttgtgcatagatatcttcgggaagtgaaagcagagtgaaattatcctctacacggggagatactactccaaatccgtcaggagtcggaagttccaacagttggctcagttctaacaaagctaactgatagttattgtcagcctgtactgctgacatttcgtcttgggcgacacgtgtgcgggcttcgtagacttcggcttcagatgctttcccatttttgaaataagcttctttcaattccagctgttcccggcttaactctacttggttgtgagctacttttgctaattcttcattaaaaagaatttgtagataggcagaggtgacagaaatgctgatatcttctttggccttgttcaagtcctctatagctgctttcaggtttagtttgctgagagcgatgttgttcggtattcgcaatcctgtaaataaagggatgctggtactgagtgagaagttggtatttttggtattacggtcgccatacgtattgtctgcctgtaaggcacggccgaagttaaatgactgtcccacattaccgttcagattaggcagacggctgtatttagcagtattcaaatccactgcattttgatctcttgctgcttcctgttgcttgatgctcaggttgtgttctatagcataatcaatgcatttacgtaaatcccatttttcttgggaaacggccggtaatgcagtcagggtggccaaggctataatgatttgtttcttcataatgatattctgttatttcttttctgctccgcgtactttttcattgacattcagaccgttctttatttcaatctggataccgtcactcatacctgtaataacggcacgacggctgaatttttgtgaaggtacactatcagtcaatacatatacaaaagtagagtcgtttttaaactcaacagtactttcgggtactgccagtaccttgctggcacgtgccagaacgatttccgcatttgcgctatatccggaacggatggtaatactgtcggggactgtgatggctgctttgatctcaaattggttagcaccattttcttctacacctttgggggatatatattctagttgtgcatcaaattccatgttttgtaaggctcctaaagttatttttaccggcatgccttcgtgtatgcgtcctacttccgtttcatcaatattgccgcggaaaatcagatcattcatgttagctacggtggcgatagtggttccgtcattgaatgtgttgctcattatgacggagttaccggcttttacgggcacatctaaaatcaatccgtcaatagtagatcggataagggtactactgaatgaagctttgtttttagtgataccttctttgactatttccagattgtctttggctgtttgtaattcttcacgtgcttgttttacagctacttcactcttttcgtattcttcactgctgataagtttgctttcgaacagttttttcatgcgggcaaagtccgtttccccttgtctggcattgatttctgccagccttacacggctttctgctgagtttagttgtcccagttcggggatcacctttactttggcaatcacttctcctttctttattttttgtccggcttccttatatacctcgtcaatgatacctgaaatctgtggcttaatcagaatctcgtcacgtggttctatttttccagtagctacagtggtctttttcagatcggtgatttctgcgtttaatatagtatacacgctggctttgggttgtgatttttgatagagaaatacaaatgttccgatgaatatcagtgcaacgatgactaatagtgcaatttttacatactttttcatatctgtttgttttattatttttttattcttgttggttcttgcatggaaactttatccgttacgtcggatggttttattcgtctcttatagcctcaattggtttgatggccatagcgcgataggccggtgctaatccggccagcatacctaagaccatcaataaaatgcaagccccgacggccatccagaagctgatttgaaaatgagcctctgtacccgaagctgccgttcctacttctaatccttgtaagatcaagactccgaaactaatccccattaaccctgcaaaagttgtcaataccatgctttcagaaagaatttggtttagaatatctttagggcgtgcgccaatggctcggcggatgccgatttcggttgtacgttctttcacggtaaccatcataatattgcttactccgatagctcctgccagtaatgttcccaaacctaccatccatgccaaaattttgatgcctgtgaacagattgtcaatcatgctgaacattgcttctgcattgaccatgatcaccgcttgtttgtcgtccgggtggatatagtgcgctttcttgattacttgttctattttgtcggctatactggtaacagttactcccggttttacggtaatacagactaaatcaatgcgctttccaaagttgtatgctttttgcatggtagtaaatggaagagttacactatcctctgttccggcattgatattcatgttactggttgataagctaacacctacaatctgataataaataccatccacacgcaaatattgtccgcatgggtttcctccttggggaaacagttcgtcgtatacacgttttcctatggtacagactttccggttttccagtatgtctacgtcattgataaagcgccccattgtaatattttgagcttctatcttttcataatcaggctgcaatcctctgacggcacaggagcttttcttgtctccgaaaatagcagtagagccccatcggctgatattgggagtgataacttctacttccggtacggcttggcggatacgttccacatcgttaaattccatatcccaataacgtccttttctaaatcctttataggcttcactggttttattacttccgaaaaaaacggaattggtggcgaatcctttaaagttggccgacatcatatcttgtagtccttggccaccccccataagggccaccagcatgaatatgccccaaaaaacaccaaaagcggtcaataggctacgtgtcttgtttctggtaatggtgatgaatatttcttcccacctgtctaaatctattctcataattttaatctgctctaagtgcttcgattggtcggatcatgacggccttacgagcaggaaagaagcctgccagtgtaccggctatcaccaatgtcatggttgcttgtatggctatactgatatctactgtgggattgaggaaaactgtttcggtgaaaacgcctgcgtctacagtttggtttcctgccactgtattcatgtattctgtggcagcgatacctgccaccattcctatatacccgaaaaaggtggtaattgttacgctttcggctataattagccataagatagatataggtttggcacctaacgctttgcggataccaaattcacgggtccgttcttttactgtgatcagcatgatattacttacacctacgatgccactcagcaaagtgaatatgcctattacccaaatggctatagtcagaatgcgcatacctttttcttgttgcaggaattgagtgaaacggttccacatccagatagcgcctttgtcatcagctgtaaaccggtggtgtatgccgatagctttgcggtactccttttcaaagatttcatttttttcttctgtatcgagtcctcgtgtcataaatatcaaattgttcagcttgtcacctttattatatatgagttgtaaggtggtgaatgggatgaaggcattaggttggaaacttcccttgtcggtaaataggcctactacttgatatactactccattggcgttgacaaattttccgatagctttgtctgcgtcttttttaaagagcatttctgcggtttttgtatgaagaatgattacttttcgccgttgacggatatcaatgtcattgataaatcgcccccctgcaggttttactctttctacatctttatgattagggtatactccttccagtgtggtggatacatagtcttgcccgtatgttaaagtcacattactctgacgtacggtagctcctacactgatgacattttggaggaaatcggtttcggttatccgatagtctttattgtccagttcaatgcggcgtccttcttttaatccatcgtatgctttggaagtccagcctggaaatactttgatggaattcatagccatatctgcagatgagctttcgaaagcatggattagtccgttgcctgcccccagcagtacgatcaacatgaagataccccaagctacggcaaagccggtgaggaacgtgcgtaatttattgcgctttattgttccgaatatttcttgaataagatcaatcatgtgtgtcagttatttcatgaatccgttcttgccgaaaggagaggcattatggtctatgttttcttcaatccgttcaatcagtccgtccttaatatggatgattttgtccgtttggtttgctactccactttcatgagtgacgacaacaattgtcagtccctcgtttttatgcagttctttcagaatattcatcacttccacggatgttttgctgtccagggctccggtaggttcatcggcgaggatgatttgcggtttggatatcaaggcacgtgctatggctacacgttgtttttgtccgccggacaattcattgggcatatgatgcgcccattctttaagacctagtttgtcaaggtattctaatgccatttgattccttttttttcggctcactccttgatagaagaggggaagagctacattttctaccgcatttttaaaagaaatcaggttgaaagactgaaagataaatcctatcatccggtttctgtattcggcagagcgggtttcactcagattcttgattaatacatcgttcaaataatattctcccgaatcgtaattgtccaagatgcctaaaatattcaataaagtggactttccggaacccgaagctcccataatagaaacaaactcacctcgttctatgtcgaggttgatacctttcaaaacatgtagcggagctccgttatgataggttttgttgatattctctaaatgtatcattaccgatgaatttaacttgtgtttgtctggttagacgtgccgaagatacaaaaagttgcaatgctatatgaaataattgaaaaaaaatttgctctcttttttcgcattgtgtacatttgctcaaaataactaaccctaaataataatatatcatggtaacaggcatggaaaaaccctacgtagtaggtatggacattggcggaactaatacagtttttggcattgtagattcgcgtggtaacgtattggctaccgattcagttaagacacaatcattttctaaaatagaggattatgtagaggcggtcagttcaaagttgcgtccgttgattgaatcgttcggtggcgtagaaaaaattaaaggtatgggggtaggtgctcctaatggaaactactataacggtaccattgaatttgctccaaatcttccttggaaaggggtgattcccttggctgctttgtttgaagaagcaataggtgttcctactgctttgacaaatgatgctaatgctgccgccatcggcgaaatgacttatggtgcggctcgtggcatgaaagactttattatgattactcttggaaccggtgttggtagtggtattgtaataaatggacaactggtttacggacacgatggttttgccggagaattgggacatgtgatagttcgtcgtgacggacgtcagtgtggttgtggtcgtaagggctgtttggaaacttattgttcggctacaggtgtggcacgcacggcacgtgaatttctagttgcccgtcccgaacctagtttgttaagagacatcccggctgaagatattgtatctaaagatgtttttgacgcggctgtaagaggggataaattagcacaagatatctttgaatatacaggacgtattttgggtgaggctttggcggatttcattgctttctccagtccggaagcgattattctgtttggtggattagcaaaatccggtgattatatcatgaagccgattcgtaaagctatagatgataatatcttgaaaatttacgaaggtaagactaaattgttgatttctgaattgaaggatgctgatgccgccgtgttgggagctagtgcattaggttgggaagtaagagaataatggaaaacaaaaagcaaggatataaagttcggaaatatcagggaccggtaaaacgttattgccagatgttgaatctgaaaaacgatgcggccttgatagccgagtatagaaagcgccattcggaaggcaaggtttggccggaaacattggcagctattcgtgaagtcggtattttggaaatggaaatttatatcctggggactaatttgtttatgatagtggaaactcctctcgattttgattgggatacggccatggccagaatggctacgttgcctcgccaggcagaatgggaagagtatatgtctgtctttcaacaggcagagccgggagcgtcttcggctgaaaaatggcagttgatggatagaatgttttatctatatgaataactttcattctagataataataagaaaaggatatgataaaaatcatatccttttcttatattataaaattataaacttgtgttctttatggtaaagctcatcaggcattcgcctgttggctcattaatttctgaagcttgtattgcaaagattggcaagcagctccttttctcattgctttgtatcttcttaactgatactgcaacatctcgattgtgtcatttgttcttttcataattacatcttttttatgttctcccgtttggagaactggttattcctaaaaaccttttgttttctcttttactactgcaaagataacaccaaaattcctatttatgttttaaaacatagtgttaacctgctttatttaacttttaatgtgtattttatcttattgtttagtatacgttaagaaatatagctgtaaaaatgtcacttataatctgacagggaaatgttcattaacacaagtggtggatctccttaaatcctaagttcaagcggataatgcaacaggagtgagaatgatgacaatgagaagatacgaaaagaataatttttcagaggaacagagaaagaagatttctttcccttttgttcccctgtggaaaagttgtttctttgcatcttccagttccccaacattcagttgcaatatgaaacagctaaccgaagaacaaaggtataacatttccgcttatctgcaaagcggaaagtcaagaaccgagattgccaatcttgtaggagttcatcgtagcactataagtcgtgaattacgtcgtaatagtgataaacgtaatggcatttacaaaccggatctcgctcaggctaagtatatgtccagaatgcgttcacgaaagcacttcgtgaagtttacggacgacttgaaaattcaagtagatatactcataaagaaagatttcagtccagaacaagtgactgggtttatgcgaacaaagggcttggaaacagtttctcatgagacaatctaccagtatatttgggaagataaaaagcatggagataagttgttatacaagcatttaagaagacggggaagaagtcataagaagagaggtgcattgactaatggacgtggttttatcaaaaaccgcgtggacatagacaagcgtcctacgatagtagacaagaaagtacgttttggtgatttggaaattgacacagtcattggaatgaatcacaaaggagcactattaactataaacgacagggtaactggactagtatggataagactacttagcgggaaagatgccagcccgctaactaaagctgccatcgatgccttggaaccttttagagaccaaatacatacaataacggcagataatggaaaagaatttagttttcacgaagaaattgcacgtaaactaaatatttttgtttactttgcaaaaccataccactcgtgggaaagaggagccaatgaaaacagcaatggtttgattaggcaatacttcccgaagggtacggactttagggacataaccaatgaacaggtaatgcgcgttcaaaacatcttaaactcaagaccgagaaaaagattgggttacatgaccccaaaggaaaaatataaattattaactaacaatgaattcgacactgttgcattgtctgtttgaattcaggaatcatgttagagaacataattttctttttgttgaatttgcaaatttcaataatgttcgtacctttgcattgtgtttttcatagtattagatttaaggttaacaaaggttggagcaaggcgttgctcctttttttatgtctatatctctgcataaaagtttcctttttacaaattgttttgttacattcgcaccatactattgatattaaactactattatgaaacacttatttatcacaattctactcttattaccattgtgccgcatgctggcacaggagagagaatacgtaattgttgttcatggaggtgccggtgctatggaaaaccttgaggacgataaggagaaatcaaccttgtattatgcggctttagattcagctttgagtatcggaaatgctatattggatgctggtggtgaaggacctgaagcggtaatggcagttgttaactattttgagaataaccccttgtttaatgctggtaaaggggctacttgtaccagtaccggtacttttgaactggatgcttctattatggaaggtaaggatttgacagcaggagctgtcgccgggttgaaaacggtgaagaatccgattaatgcagcctatgcggtaaaaaataaaacacctcatgtgatgctggcaggtgagggggccgaccggtttgcaaagtcacaagggctggaaattgtagataatatgtattttgctactcctaagacattgaagtggatagaggatttgaaaaaggagagcaagaagaatggaactgtgggctgtgtggtactggacaagcaaggtaacctgacagcgggaacaagtaccggtggtatgttcaagaagcaatggggccgtgtgggggattctccggtgattggtgcaggtacttatgcggataatgaaggttgtgctgtgtcgtgcaccgggcatggggagtattttatccgtcacgtcgtagcttataatctttctactcgtgtgaagttgctgcaccagcctgtcggggaggctgccgattatattatccatcaggaactgaataccaaggagggaaatggtggattgattgcagtggacaagaaaggtaattttgccatgccgtttaatagcggaggcatgttccgtggctacttgtataaggaaaaaggaacaggcaaaatttctaaagcagtgggcatagggaagaagatgaaaactttataattttagttcctgtttgaattttcctcccacctgcaacagagttttgcaaaactgctaccactactaccatcctctttcgtaaacacccatgaacagggcgtttcaaaggtggtggtagtagcatgaaaaaacatctgctaccaccactttttatctgttatcacttccctttcctctgatagtttgggaattcctgtcacattttgtcttagcttcgttaccccttggaatagacacatccgtttgaaagctgtaggctgtatgtaacgacacggacagttggtatgcttatcgggaaccggtacggatgatatcttgactattcactgacggagaagttttggagcagtagaattttagcggggctttcatccgtaagaaaaaggcatccgcaaaagactttggcatcagattcgtccttaaagaatctcatccgtatccctaaccctttcctgacgtatggttaaggcttttctacctgtttgtcttatctccgcaagcctttggagttaactccataaccttgggagataactccaaagcttatggagataactccaaaggcttgcggagatagaacatatccgtataaaaaggcttaacctgaagaaagaaaaggcttatgctatagggtagggagtgatatacattcaattgaggcttgactactcctacagccatgatgtttgaagcgatgctggatatcctgccggttcgctgatgcggctgtaaccggaatataatatgcagcaggctggtaatgatcagacgcttaggaacatttggatattatccgtaaatacaccgctttgctataaaatgctgtctcgctgcggcttgatcggttgcaggtgcactcactgagtatgaggtaaaaaacattggcggaattaattcagtctttcaaatacagtctggattaactccgccaataggctgccactatcggatatcttatttataagtaaccggtatcaaccttacactaccatttaatcccgatggcaatggctgccaatcagtataaggtaccggtttgtattgcagattcaccacattgatttcattgaagatacgccatttctcaccccgacgatccatatccgcaatgcggttggcaggcagattggtcacttctatttctatcttgttatctcccggtttcagccatttgcctactttcaactgaaaaggtacggcccatgctgttccggcatcttgtccgttgatgcgcacacgggcactttcccgcacatcgcccaaatccagtatccagtcatcggcgggaatatggggaacagtgatgatattagtatatactcccgtcgccatggtaatcggagcgttggggtgagcaatttcagtccacgaagacggagtatcgatatcaaatgtaccttctatcttgggagtgctttttgcaaaatgaagtttccaatcgtgatcaaggctgaggctgacagattgttcttgaacgtatttccattcggcagcctctgtcaaggcatggttgaaagtttgcaggatcacgctttcgccggaatgcagctggagacgtacttgggtttttcctccttccttgcgagtttgtgctttccctttttctcccgtcatcggattaaacagcatggcactttctgcgggaacggctaaggttatccagtcgtttactcctttttcctgcaatgaggagatgaaataatgatgtccatcggtatgggagcggcggatacattgtaagccatatcgcgttttcatttcttcgggaataacaccgcttttttccaaggcagattgatagttgtttcctgtaatgatgattcctttctgataaggagttgccaccgttttatcgaaagaagaaacttccggaagttgcttttgtaattgtgcaaagcttttccggcgtgcttccagttttccataaccgggtacatcctgcggatagttttcggtaaagatgatagtagctccggcttgtgccagctttagtaaatggtcaagtacctcggacggcattaattttacagcaggaatgatgatggctttataggaagttcctcctttggtcagtaatttgccatttacgcaacgggtacttttcacaaagttgtcagagatataatccatgtcatagccgcaattgctgatggtatgaacggtctctataaacttgggagcacgttttgccatatcatggatgctgaacagcaaaagacggcccggctgttcctgccacatatcatatacaggcagataaacgagaaaatcattgtccggtttccccatttgcaggaaagactggcaacgggtgatatattcaaagaaagcaggagcatcctgccaaatgttattggtaggagacatatcaatagaggcataaaacttccatcccggccatttggcttctttaggactgtagggggttccatggaaaaacatgtggtttacacctgatacgaacatcaaatccatatccggtttgcactgggaaagtgaggtacggaaatgttctgtcagccaggtgaatgtttctgaagacgtgtagggctttccggcgatatgggcagcggaagaagcatacttcagcatggaaaggtctgagtcattcttacgggtcagggaatcttggcgcaatcctttaatatggaattgcgacaggccgaatccttcgcattcgggaatatccacagaggcataggtatctatcagattggcaggggaaccatgtgcttggttacgggtgatgctgccatgaccgtgtgcccagttagtccattgggtactgaaattctcaatcaataaatcggagattgtttcgcgatagtcactgactatgcgggcggtggtttcattacgatcctgagctataaattcagggaagtgttcttccagtttatagccacgacgacgggcgaattgttccaggaaatcaggagtccagtcagcaccatatacttcgtaagagtcattgaaaaaagtatgtggaaaattggtcttgttttctttaaaggctttgtcaaagttggcaaaatagcgttttacggctcctttatccaagtggttcatcacatagccttctccaccgggagcggcacgtttcactttttggaatgttttacctatatataaggtaataatatgccaatgacctgccggagctttccattgtaattgtccgttcttcgctttggaagtgagattaagacattgcttattgtccgcattataggccataacccggcttaaagtggctacagggcgttgtttctcttcttctactttcaaatctagcgtaatttcttttccaccctctacttgataagattgaaaaatagctttggtagcagcatctgtcatactcacgtgaggaccgccgaagggccatccggtaccggtgttcatatctacttcaataccgatgcgttttccttcagtttcagtatgttgcaacatattcatccattgcgggctgaggaaagggaggttattcttatcgttgccttgaacaccataaataggagtgatttcaacacctcccagtccggctttggcatattcctccagattgtaggtcagattggttgcatcgacagcacttcccagccaccaccagcgggtagccggacgggtttcggggtgtactgccggccattcttgtgcataaaggctgcttccggtcagtaataggctgaacaataaatattttctcttcattctatttgttttttataagtttgctgcattgaattcttttccatccactgtgatgttcctgtatctgatatcattggcatcctctgtgacaaacaagggacgtccgtccgctttctcgtaatggaaatttacattgtccaaggtgatgttgcgtgcatggcggatgtagaaacctttggcgggaatggttccgaacatccacggttcaggatatactttctcttgttcgggaggagtcagaagtccgtcggcttctgtatatcctccttggtgatagatatgaatatcgctcagtgtcacatcttcaataagggctcccggtattccgctgataatggaagagtagcgcgagtcggcattaaatacattgacgtggctgatgaggatgcgtttcattgtgcccacgggcgttccttgcgggctgcgcatccgggctcctaaccgcaggaagacaggggcgttgacaatatcgcgcatcgtgatgttgctgatgacgatatcttccagttttcccccgtctaccgtttccagggcaagacctcggcaacgttcgaatatgcaattggtaatggctatgtttttaaaatcgccactggattctgttcctagtttgatacgtccggttacaaacccgtgatccggtgcttggggttcgtctcgttgccaggtacaatccaatacactgccacggtcgtatccgctgacaaaacaatcggagatggttacattttccgtatccttgaaatagcctaatccgtaggacgctttaagcacgatagcatcatcccagggagcgttgactgtacaatgactgatgcggacatttttgcagcagtctatgtcaaaaccgtcccggttggtatctactttcacgttcagaatgctgagattatctactcctgtagccagcagaccaaaatgaccgcaatgcaacaaagagaagtctttcagtgtcacgttcttgcagagtttcaagctgatggctttgttgcctacaccgggcaggcggctttcctcacgggtgagtcctttgccataaatcagtcccggtccgctgatggtgatgtcttccagaccgattccccaaataagtgagttcttccaatgactgtgcccgaaatcctggaattgggtgtgttcattcggttctgccaggtcataaccttccgttgctgatgggaaggcgcctacaatttgtgctccttgttctatgtacaaatgtatatgactggccagacgtatggaatagcacgcgtattctccggcggggaagtaaatggttcctccaccctgagaggcagcttcctcaatagctcgatttatggcaggggtgtcaatggtagtaccatcggctttcgctccgtaatcttttacattgtatatctttgcctgtgctgtccatgtgctgaggcataaaaggaagagtatgagttgtttcatggtctgtctttgcttttactgaatgggcattagtttgaatttgtgtaaataagatgcattgccatacatggtatgttcatcggataaattccagaatccgtctttggaggtagggtgggcatcccagtcaatcactgcccagcataatccgatttcatttccttcttttaataaagttgggcaagatagttcgggaccatcggcatccgcatggtcaaagggagtgatataaaattccaatgtcagcttacccggttcaccctccttgaaagagtactgataggcataatcagcgtatggcttttgtttcagccatacttgaggaccccataacatacaccagtcattgccgtgagccggggtgaagatgtgatagttctgggcatggcatccgtgaaatttgaaccaagcctgccatacgtctttgggagctgtgggatgaaaacggtcgatgaacggtccccctgaacaatcgccatccaccactacttcaaaaatatccgtgttcaaggagttctcactgaaccgccaataattatcgtatgcttcatatagaaaatacaacttctgagtttctgcacaccaacctactttgacactgactttcaaggtggtggtatctggctgtgcatgttttccctcgtcttcctttaaagctgtttccgttatcttataatcagccggaacgcaatcccagtcgtgggtattgccatctatggcaggaaccttatctgccggaaattggtacaccttgaattcctgtgcctgggcagacaggcataggaaaaggaagaacaggtatagatacaatcgtttcattttgatcgggttttatgttctttctcgaataatccgggtagcatgaaataattataatctgctcgttggtagaaacaaaagtagagcttttcttgcggtttccacgggtatagggcagagatgacaggggcatctgtctttttaccggagttgaataaagcaagcggggatgcttgtttatgtccgtcggacagacgaatatcggaaccgatgggagataccccatgaaccgttctcagtttcatgctttcaccataataggtagtaaaagcgtttccttctatactgaatacattatggaagcaggaggctgccggaatactgttgtctgttacggcagggtcgtctgcaccgtcgcatgcaccgaaagcccagcaaagtttgagctcttcgggtaatcgctcaccggaaatctccatgataaaaccattactatctgtcaatggacatacaatcagctttatttcaccttctttccataatttatctttaatggtataagcctgtccctttttcttgacactgcattggtccagccagcaactttcattgccgcaaaccactcccagacggaaagttcccgcacctttggataagcggaagggaagggtctgggcgttgttgctaaagacagacaacagcatacagagaaagaacggaagtagccaccggctataattccatgttgttttcatagctgatattgatttgtgcgttcttattgtttttttcttccacacggctgccgtcttctacttgtaaccggacatcttccaagtggaagtcttcggtaaagataatgcttcctgctttatttaccttggcttttatgccggaaatatggaaattctgcaaaggcagttcctcattccagcctgcagcggtgataaaggtttgcacattagtagcttttacatcgctgagccatacattacggaaatgcggataccctttttctttaggtgtgacaggagtcagcataaccttccaatgttcgggaatctcttttccttcatattcagccggtaaggtagaataactatagctggggttccagttaaggtccgctgccagtacatggcggacattgtctgctgtcacttgggtcatgtagatattttctacggttccaccgcggttcatggcagatttcagacggagggtggaagaggttccgtatgcttgaaggttatatcccaagacatttcggatgcagcctgaagtttcgctgccgcaggtaataagtcccgcacctttacgtgcaatgcatccacgaacaatgatattttcggtgggacggtttacacgcaggccgtcggcatcccgtccggctttcaggcagatattgtcatcgttgcaatctacttcacagttttcaatcaggatattggtgctggaatcaatgtcaataccatccgtactgggaccatgcccccctacgttattattgattttcagtccgttcaaggtacattggtcggaatacagcacttggcaaccccaaaatccggtacgcatcaaggtaaagtcttttagtgttatatggcggctgttcgagatgagcattcctcttactcgtttgcagtcgtagtccacgatccaccgcagtttgcgtttctcgtaatccttccgcatggtccaatatttatcccaaaatatttttccacgacaatccaacgtacctgctccgctgatagctgcgttttctgcatccagaatattgatgactgccgagggccataccatttcgatacctgccacgcgggagcgcatttcggggtataaatctatatcctcgctggctatcagcgtcgtaccttggttgaggtggaggtttacattacttttcaggtagatggcaccaatccggtagtatcctggggctacttccactgttcctcctccggaacggtggcattcgtcaatagctttctgcagggcggcagtgcttaactgggtactgtcatttttcaatccgtaatcggctgcttggaatatttttccctcaggataggttttggctcctacttgggcagtccacgaaaggtcaggagttcccatcccttttccccattggaatccggagagggattgggcattggtaaagagggtacctaaggtaaatgatagggttaataataatgttttgttattcatttgttcttacttttaaattaattgccgtccggcttttcaatttctgtaaacgggctgtcattccatttgaaactgtccaaagcatccggatgtgcaggattgtaaccggaatagtcgctgcgcaaatagttagagataggtaatcccgctttctttatcccttcaatgatacatttggagatttgataagctccgtaaggattgaaatgagtattatctgccaataccctgttttgtcccggataggttccggcaggataatgtacgaatgcctttttggaaggttccactcccattgcttcatagagggtacgggtcatttcgttgagatcgatcaaaggaacgttttctttggcagctagccaacgcattgcttcgggataatcttcgtgagtatctctgattttcccgttttcatcgaaactgcggcgttgtgtcggggttaccagtacaggataagctcctcgtgcccttgcctcatcaatgaatgttttcaagctggtcataaatgaataataagctcctttaccgggacctttttgcttttggtcgttatgaccgaattccataaaaatataatctccgggtttcatttgtgtcaatgcctttttcagtcgtcctgcaccgataaaagtattggcgctttcgccggattctgcataattggcaaaacaaatgctgtcattgaagaagcggggaatcatttgtccccagcttgcccaaggttcattgtcctggtctactacggtagagttaccgcataggaatactgtgggtacattatttactttctcaataatcagttcggacaattggggggcatccccgttgaattccaaagttagtttgtcatcccagttcaatttttggcgttcacgcggtttgatgcgtacattttctttttccgaaatatgtgtgttgcgcttgttgatcacaaatgtacaaggttttaactcccctttttttgtcttcacattttcgaagaaaaggcggcgtgattctcctcgcactgttgtttctccggcagcgcgtttgtttcctatcacgactgtgacgtggtagttgccatcgggtaccgtaatagagaaaaagaatggggctgtacttttaccttccggagagggctgtctgtcatatccgtatcccttttcctccgagtatctgtcggcgggagttattttggtataaccgtctttagtttttttacctgtggtaaaatcgaatttgtaagtttgtgcttcgactcctaatgtcgctaaaagtccaagagctaatagggctatctgtttcatgattgatatagattgttattaattgattttcggttttagttcatccggagagtcattggtataagattttatgtcaccggctgtttttgtgaacaactcactgatttgttgaggtgttacagtaaattgcggacggaactggtccgaattcatataatccaaaatggctttatgcatctgacgagctacaatgcgtttctctggctgggaggtaatgtccatgcttgtcatgagcactttcccatttaatacattggcttcgaataacatacctatcttgcggcttatgaaccaagtgtcaatgctttgaaccgtaggttggaaagcgggtggaaagtgggtgaattgcatcacttgagcatgattcagcagttcccaccattgcagattgctgtgatattctgtcggaaactgacggaataacgggtgtttggggttcactaagatacctgtggtatgaggaggacgcattttgaaccaggaggtgttccagaatacaggagtgaattgctgaaccacttctttaccataactcactttgcccgcagctgtaataagcacatttccaccatgctgaagaatttccaaggctttcgaatccaaggtatcggtagtgtatacttttccttcggctattgtcacttgagcgggataaacccagaaattccagtcatttacagcttctgttcctgtaatgcgtatttccagattcagctttttagcctcttggatatcagtaagcggaaactcaaggctaccagtgtgatttaaatttccgatagggatgtcttgtgttgccaatgtgccttgcgcatatactttgccatattcgtcttttaacgtatatacaatttctgcttgttttaatgtcttggcaccaaaatgagcaacttcaatatccgcctttaaaatctcattgttattatatacaaatttatctgtacgcatcagtggaacagtaggtgagcaaaaacgtctccattctgcagagttgatatatcctttttcttcaaagaaaacatcaagaacacctactagtgcagttccctgacccgaataatcgttcagtgccaataattggaaaccggcataatcaggcgtgcggagtgtcttttctatttcatatttataacaaagggcttgcaactttccgctggccatcataaatagatgggcttggtcgctcatgtggttatcagccagaatgtctttgaaaatttcgaagttcttagctttattaacacctgtatatttacgtatttcattgaaattagggaaagcacaccattgacctgtttcatgggatacataaggttgtttcactgtgtcaagatgattctggaaacgataatcgtcttgggtggatggctgtcttctagaccaggtcaggccacgtgcccctgcctttacatgatattggttgcggggttgccattgccatccgttgcctaccgatgctccggtatatacatgtctgggatccttcttttcccaatattctacgaacttggtcacccattctacccagcgtccgctaggttcgtttccgcatgccaacatgcaataagaggcatagttgccatattctttggttaatgcgatggtttcgttcatcaaataggtgtcaataggttgtcccaaacctaatttaggaccatgattgggccagctcggaccttcgggttgcagatagaatcctacccggtcggcagctataaaagcggcttcgggaggacagaatgaatggaaacgcatgtgattcagtccataactgcgacagatacggaatactcgttcccaactttctacatccatcggggcgtaaccggtcaacgggaagtcacagttctcaactgttccgcgaagctgagttttacgcccgtttacataaaaccatttacctttgatttcaaatcggcgcataccgaattgtatttcttttatctcagtttttttcccattggtgacttctgctttcagtttgtacagggccggatgaaattcatcccatagcagcatatcattccccataggtaataccatttctgtttccgttactcctttgttaagtttgatttcttgttgtatggcgggaactatatgctttttatccgtattgaaactctccgctgataattttatttttgtaatgcctgcacctttgatgacgactttgacacgtgccagtttttgttccggttccggatatatttgaatatcatcgaaatatgttttcggagtcgtttgcagacagatgcgtcctacaataccgttccagtttccttgagtttggtcggttatgctgtgtgaatccggtccaacattgatttctttgatacgattatccactcggatggtgatagtacattttccgggacggacataacgggttatatcatattgatggggaacgcaaagactattctgcattcctgtcttttgtccgttcacccatacagttgtttctatatggggacgttccagaaacaacaaaatacgttcacctttccagtcggcaggtatattcacctctttctgataccaagcagctcctacataatgtttgtcaggagtcagaaagaatggaaatttaatattaccttctttacggtatttttccatgtatggattataatagtaagaactgtcatagagactgcctgtccattgggtctttgcggtgacctcatcacctttcagtttctcgggcatggagccgggcaggttgatgcagtcattcaatgtgtggctgaaccatttttctttttctccattatcctgacggtctatactgaatgaccattttccggataagtcaataattttttgtgcacttaacgagaagcacatccatgttaggcagattgtcaataacgtttttttcatagtatctttttactttgaatttgatgttgctaaattaaggtcttttcatttgcatgtaaatagaaagaagtacatatagatggaaattcgtataaaataagggtaatgtgcgatatatttgtacgattttacatggatatgccttgtatgtgcagaaaaaagtccaaatctctttttatctttgtatgctcacaattaaatcattgtatacatgaaaaaacgattattcagtttgctctgcttgttaggggcagtttccggattatttgccggtgatacggcttatttgttctcttatttcattaatgacagtcgggacggtcttcatttggcttatagtttggatgggctgacatggactcccctgaatcatggaaaatcattcttgatacccacggtcgggaagaaccgtctgatgcgtgaccctagtatttgtcaggcgccggacggaacctttcacatggtgtggacttccagttggacagaccggattataggttacgcttcttctcccgatttaatccattggagtgagcagcgttctattccggtaatgatgcatgagcctgctgcacataattgctgggcacctgaattgttttatgatgaaccttcgcaaacttattatattttttgggcaacgaccattcccggacgtcacaaggaagtgccggtcattgagagtgagaaagggttgaaccatcgtatttactatgttacgacgaaggattttaatacattttctgaaaccaaactgttctttaatcctgattttagtgtgattgatgcagctattgtacgcgatccggtgatgaaagacttgattatggtggtgaagaatgaaaactcgttgccggcagagaagaatttgagaataacacggacaacacgaatagaggatggatttcctactactgtttctccttctattacaggagattattggtgcgagggacctgcgccactttttgtagatgatgttctttatgtctattttgataaataccgtaatcatcaatatggagcagtttgcagtcgtgatcatggaaagacgtgggaagatgtgtctgatcgtgtatcttttccaaaaggaatccgtcacggaaccgcttttaccgtagagaaggctgtacttgataaattgcttcgtatccataactttaatcctcttgttccggataatattgctgatccttctttatccaaatttggtgatacttattatctttatggtactactgatattgataaagggttgtcacaagcaggtactcctgtggtatggaaatctaaagattttgtaaactggagttttgacgggtcacatattgtgggattcgattggcataaaggacatgaatatgtcaatgctaaaggagagaaaaagacgggatattttcgttattgggcacccagtagagtagtggagaagaatggtgaatattatctttataccacttttgtaaaaccgaatgagaatgcacgtacctatgtgctgaagtccgaccgtcccgaaggtcctttcctttttgccggacgtaattctatatcttctcattctttggatgggtttgatcaatcttgtattgctccggatatagatggggaaccttttgtggatgatgatggaactgcttatttattctggcgccgccggatggctgcccgtatgactgacgattggcagcatttaaccggtgatactattgtgatgagtacagctcgtcaagggtattcggaagggccggttatgtttaaacgtaaaggtatttattattacatttatactttgagagggaatcagaattatgtaaatgcttacatgatgagccggcagtcccctttgtcgggctttgaaaagcccgaaggcaatgatatttttcttttttcatccattgccaataatgtttgggggccgggacatggaaatgtattttataatgaagaaacagacgattatattttcgtatatttggagtacggtgacggaggaactacccgccaagtatatgctaatcggatggaatttaatgaggatggcactataaagacacttgttcctgatgaaaagggagttggttacttggctgtcagccaggaacagcgcgaaaataaggcgctgaaagcttctttcagtgcatccagcgtacgttctccccgtacttctaaggttgaaatagaaactcagcctaatcgtcctttggctgataaaacttcgcttgtcaaggtggaacgcacacatatatatcaccctggaaatgcaggcgaccagtctaatggaacacgctggatggcagaaacaaatgatgatcatccttggctgatggtggatttgggtgaagccatgcaagtaacggagtgtcaatttgcctttgtacaccctgctgaaggtcatgcctggcatctcgaaaaatccaatgatggcactaattggcaaccttgtgccgaagtaaaagaggtgaaggcatgttcacctcatgtggcaacggtgggagataaagtacgttatttgcgtttgcacatagataaaggtgcagccggattatgggaatggaaaatctattaaattactattttatcatgaaaaaacgatttgtgaccgttcttttggcttgttctttggccggaggactttttgcacaacagccttggtttaaagacaaggatttgaccttgaccggtgcttattattatcctgagcattgggatgagagtcaatgggagagagattttaaacagatgcacgatttgggttttgaattcacccatttcgcggaatttgcttgggcgcaattggaaccggaagagggaaaatatgatttttcctggttggataaagcggtggctttggctgccaaatatgatttgaaagtcattatgtgtacttctacggcaactccaccggtatggctgagccgtaaataccctgaaattttgattaaaaatgaaaatggtaccgtgcttgatcacggagcacgtcaacatgcttcttttgcttctcccgtttatagagaactggcttataaaatgatagagaagttagctcagcattatggaaatgattccagaataatcggctggcagctcgataatgagccggccgtacaatttgattataatccgaaagccgaactggctttccgggattttttgcgtgaaaaatatcatcatgacattaaagcattgaatgatgcctggggaacggctttttggagtgaggtttattcttcttttgatgaaataactcttcctaaaactgcccagatgtttatgaatcatcatcagattttggattaccgccgtttcgctgccagtcagacaaacgactttttgaatgaacaatgtttgttgataaaaaaatatgcaaagaaccaatgggtgactactaactatattcctaattatgaggaaggacatataggtggcagccctgcacttgattttcaaagttatactcgctatatggtgtatggagacaatgaaggtattggtcgccgcggatatcgagtaggaaatccgttgcgtattgcttttgccaatgactttttcagacccatacaaggtacttatggagtaatggaacttcagccaggacaggtgaattgggggagtatcaatcctcaaccgctgcccggagctgtccgtttatggatgtggagcgtatttgccggtggaggcgactttatctgtacttatcgttatcgccagcctctgtatggcacggaacaatatcactatggcattgtaggtacagacggaacaacggtaactcccggtggacgtgaatatgagcagttcatgaaagaaatcagacagctgcggggacaggttgctgctcgtgaggtgaaaccggccgattatttggcgcgtcgtactgccattctttttaatcatgaaaattcatggagcattgagcgccagaagcaaaatcgtacatggaatacattggggcatattgagaaatattatcgcacgttgaaatcttttggtgcgcctgtagattttatcaatgaaagcaaggagttttcctcttatcctgtggtcatagctccggcttatcaattggctgacaaggcattggtagatagatggactgattatgtaaagaagggtggtaatttggtcttaacttgccgtacagcccaaaaagatcgccatggacgtttacccgaagctccttttggttccatgattaatgaactgaccggtaatgaaatggagttttatgatttattacttcctgaagaacctggcaaattacggatggatggaaaagaatatacatggaatacttggggggagatattgaaaccgggtaaggattcacaagtatgggctacttatacacaggaattttatgaaggaaaaccggcagtcactactcataagttgggaaaaggtactgttacttacgtgggagtggatagtacggacggattattggagaaagatattttgaagaaactatatgcgcaattgaatattcctgtgatggatttaccatatggtgttactttagagtaccgcaatggtatggggattgtattgaattatacagataaaccttataaattcgtacttccctcgggagccaaagtgttgataggagagccggtaattcctacagcaggagtattggtattttctattactgattgaaaacgtatgattgatagaacaaaaaggagcggcttcacagtcgctcctttttacttaacctaaatctaacctttaaatcatagtctatgaaaaatcgattcactaaccaatcatattattaatttaatttgtaaacttcacttccggcaagcaggaaacatcctactccaaaatcttcaaaatcgggtactttgtcgtatgtgacaggttgactgtctttcggttcttttccggttccttgtacaagtcctaggaagccgttagggtgaacggcatctttcaccatagcattccatgcttccaacaagactggcaggtattcttttctgtccaacagtccgttacgtaccccccatgccatgccatatacaaataaagcggtgccactggtttctttacctccgaagtttgattcgtcatgcatacttacattccaaaaaccatctgtgcgttggcaatttttgatagctttactcatggtcaggaaatcattgatatagtcggcacgatgtttttcattagtaggaatttcatccagtacacgtaccagtgctgcatatacccatccattgccacgactccaatagcaattcttaccgttaggttctttgtaggggggatcaaagtcttggtccctccaccacagaccttctttttggttgtacatgccattctcgccatgtttgttacgggtatattcatacatatcccacatcttgtcgaaatatttttgttctccggtcaattttccaagtttggcaaatacaggcattcccatctggatggcgtcaatccaccaccaatcatttacttgaggagtgttaaccagcatatctatattagctttgaccttacggattctttccggatcgggacaaatgttatataaatcaatgtaagtctggctggcacagtaatcatcagcattgcgagtggtggtaccgttgcgaaatccccattcgtggtaatttgaccaatcgacagcatatttataatattcatcgcgtggataaacggagtaaagagccattaatccttcataatatactccgcgtgtccagatattactaggacgcgttacattttttacaaaagaaggagtacgataatcggcatacttcttcatgaagtaattattgacttttataacagtcttcaacgtttcttttttgtccggcaagtcttgtgcttttacaactccaaaacctaatgcgacaaaaaagaatgatagtattaattttttcttcatcatgttgttttagtgttttaatggtagcgcaaaaataggatggtctgggattttctacaatggaaatgtgtacatcttccttgaatattatgcatgtgtacgcatttcgagtgtgttttttatttatcagtgttcttattgggctatttgtctttatttgcagatcgttcataaatcttttccccttcttttatctctagttccaaacctttaaaattaacattggccacatttgagatacttaatcctttttgagctttgatatggcaattctcaaaaaagaatgtatcatttccgaatggagcctctttaaaaccatacatggttcctgctgattgtgcttctccatttatattcttgaaatggatattgcgcaaacaggtcagtggataatgtgcaggtagaagcggaggaaccatacgccattccatattgatatcaaagatactgcgtgctcctttgatgataatatcttcaaaagtgatattttccacagttccgccacggctgggctggcttttaaaacgtaagggactccagttttcgttatccatcaggcaggaacgtatggtcacattgcgtatgtcgcctgatatttcactgcccatagccactccaccatgaccgtatgcgaaatgacagttctctatcagaatgttttcactgggacgtcctactctgcgtccgtcctcgtctcgtccggatttgatggagatacaatcatcatgtgcctcaatgcgggtggaagtaatcaatatatcattggacgaatcgatatctatgccatcggaactgggtatatattccaatgcacggatatcgattccatctatagtgaatccgtttgtgtaaagtacatgaagacaccatgaggcctgatttatcatttttaaaccggaaatcttacctcccgggcaatctgtgaaacataacagtctggggcgtccggagtttccgaatggaatttttttccattctactcctttaccatcaataactccttcaccataaactttaactccgtctgaatggtcgaaattcaagaaagcacatcgccaccttttttctatgccttcaaaacgggtagggatgacaggaaattcattggggtcgacagtgctgattagtttggcgtttttttctatacgtaaatctacaccacgtgggaagaatagagcgccgcttagatactccccggcaggaataactatcgttccgcctccattgtgagctgcttcattaatgatacgttgtaaagtggctgtttccgaatagccatttccttttacgccatattctttaatgttatattctctgttattttttccgatagatatgagcttgctttcccatgcttccagttgaatagtcagacgggtgcgattattgacaattgttgcatttatcggttggagtgtgccatctgttgcattccattcttttacaactcctactttatcaaagtctgctgtaaattctgtagctttattcccttcattgaatatgaagtagaggtcgccatcgggcattactctgcgtgtgtagcggatagaatcattgtcaggtgaaatgattttcatttctggttccggaagggaagagcttacatgtgctgtccatctggtggatggctcaatcctgctgttggttaaatctgatagggaaccaggagcagtgaaatttttgtcaatgaaagaagcgggcttctttccccaaaacaggacttttcctccacgtgaggaaaatgtttctattactttccaggcagatacggaaataacatctgatgatgggataatcaatgtttcatatctttggctgcttttattttccagatagccgggacctatggtcagtgcttccgtaaaagcatcatcgtttatgtagtcaaaatctcgttgatgagttaacagctgttgggtaagagtgacgatatccttataaacttcattgttacccagccacatagtagatgtggggtaatacatggcaatccgtgctcccggcttcccttgactcatcaggtaagtagtgcgatttgtatattcattcaggcctttcataccaggatcactcatccaattgcgatgtttggatcctgccagccagaacatgaattcaaagaagttaatccctcgggcaatctgatgatctacaacaaatttggcttggggaatggtaggagagatgtggtaagctgcaaaactttcgctgaatgctctaggttttccataaacatgagctacagatgaggctagtttggggaaatcattaagggtactgggccatatttggttccagattgcatctactccgggtatttgaactttacttaaggctcgaaaatagtctccttcagcttttacacatgcgggcatttcatgttctttgttaagatgggtaatatgggctactccattggctgcacaccaatcggcttgtaatttgaaaaagtgggtggcaaacaagctggaccagacatcccaataatcggcttttactctttgttcctgtatggtaggcgaagcggtaaaaaaggaggctagatagggagtcggatcgtacccttttgtatctttgaatgtttggacaatggaaggagtccaaggtaaatgtgcataatcgggttcatctccccggaaaccaagtacggtggtacccagctctttaccaagatattttttatactgtttgtgtgtccaatcaatgaattgttgtacggcaacagggttcagataatcacacagagaattagtggcatctttaccgccattgggattattaacggctcgggttacagccgtccgaaagtcgcttttgactaataggatcttccagtcatccagcccggcgttgaaacttatttttccattattaatttctacagttctgttaggagcgccggatgtactgacggctaccgcactgatgatttccggtgctattttatggtttgtcattacttctccccgttttatctgtatggtatcacctatcacaagagcttgcattctcaaatcgggacgttcctgtgagaattttcctcctgcaaatccgctgggatattttccttcatcaataatccagactttcatgtctcgttttttggcttcaactactccggtgcgaattgctttaaaccattcttcggaaagatatttgaaaggtagtttgtaacctgcttcaaatattacggcacggaatcctttctttttgatagaatccaagtcattgcaaatagtctttttatccattttcccttcccaaccccatattacatggttggcaaattccacaggaggttctgcaaattgttgttctagacgggaaaggggtgtttcatgaatgccttgccaggattttatttcattttttgaaaataagaagttgaaataaaaaagggaagcaataaataatagtatcttttgcatgatgtttatgattagagttgagttttatatgcataagggcgcatcaaagcgcccctacaacaaaaggatatccgttacagtttttagaggaatccttcatgctaatcttaatattattctcctaaataataggaggggacaggagcttgtgggtatcccatggaacgatgagctacatagcttctatatattccgtcctgcatcaatgtggtacgacggtcttttgccggaagattggttgtgtagatacgtatttcaccgggtaatgcggttattatttcttcacgccagtctccatataaatctgcaatcattaagatatcaccttcaatatcttgtgttagtgtttctcctttccattttacaatacttagtgaacgaccgtttgaagaggaacttgccccccatcggttatcatctcctttaaatgtttcacgcaataagtcaccgtcccaccaggcccaattacggcaggagggcacttcctcatttttacctaagggtttaccgtcagccgaaagtagatatttgtctgtgctgcctcctttacggtcttcgctggcaaaacattccagacctttatggaccggatcaaaatcagcaaccatcccatcgcctacatggaatgtcttatgaccgatattccataccggttgtcctgttctggcatccacaacacaaacgccacgtccgttctcgtgccaaggttccagacaaaggaacacttccatacccggacgatccgggtcgatatcagtcagatagattttatcagggtgtcctaatccggtagaccatagtaaagtcccgttatcatcaagcatgcatgagcctaatagaatttcatcttttccatctccatccacatcaccacataccatattatgggaacccatgcttcttactacgggattttcttcatcgccgtcccatcgccatgcacgttccagtttgttatctttcagttgccatgcatctacagtcatcagtttgtaagtgccacgacatgccaatatataaggagtcttgccgtccagataggccattcctatttggttacggttttgccggaccagatttccatacctgtcattccgttcaggccagtccacgcgggcaatttcttttccggtcattccatcccatacacttagatattcttcaccggagtctacccgtcctttttcatttcgtttggtcgtttccggagctgtttttaaggcaatttctgctttgccatctccattgaagtcgtatgcgatgaaaggggagtaccaaacaccgggctcaataccttgtcctaaatctttagaccataaaaaagtgccgtcacttaaataagcctcaatttggtaagttgaaccatccagagtgccgggcattccgggatccacatttttttctggggtacgaatgatataatcgtaaataccatccccgttcaaatcagcaacggctattttgcctgcttttatattacggttcaatttaatggattgatagtttttcaataaagaacagtccacatccaatttggaagatgtgttaatcacttttttctttttatctgatgcacagatccaataggttgcttttccggcaacgggagtttggtcaacaaagtcacaggtgtttttaattggattttttgataggcgctgtgtcttgccgtttgcagaacggtagaggtggaagggagtgtctgttttatcttgttccaatagcctccaactgaggtagatacctttcccgtctacagatggggtggccgttaaccctctgtctaagttctcttttactctttctgttgcaaaacctttgattttcggtttgggctcatggcgtggttctagtatttcataataatatgtacgttcacgcgagtcctgagctgtcatgtttattgatatgctaagcaacagcagtaccgagcataatcctataagtaggttcttgtttttcatcattgatttatatattaattatttgtttttaaaatatttgtcagcaaaacgaagaaattgtttccaatcgtatggaagaatagcgtgaggccctttgcgattgtggtatgcgatagagccattcatgtaaggtgtatccacaggaggcatttcttcacaacctattccgtttaagccatagagggcatatacaggttcagctcctttacctcctagaaattcacctttttggtcggaccagttgtcttcttctgcactggcgatatatataggtcttggagcaatcagggcaacgagttcgtgctggtcgaaaggcaagtatttttcccggtcgttaaattgtttataattaccgcagaaccaatgaggaaaacgtacattcatggcttctacagtctcaccaaaacaacgacgtgagatggcaactccacaacatcctgaattcccggatatgactaaagcaaaacgcggatcggaggctccggcccagacagcggttttgccaagacgagaatgacctatcacggcgatttttttggcatccacttttttgtctgtttccagataatccatggcacggctcatgccccatgcccaagctgcaatggaaccccattgatccggatctgggaaattctgccctttctcataataataaggatgcacaccattttggaagtcatcgtcaaaatcgggatccacatcattataacagaaagtggccagaccatatccgtgttccaaaattttatcaagctgccaggatttgtccattgatcccctgaaagatcttttcttcattttttcatctgttatttcggggacagataaatcgggatcatcatatatcgtgtaattgggcatgaagctgatacctagaaaaaccggaatttttcctgatacatgattaggaagatacagttgcaagttaatgtggggaccctgtggatcgtctgttaattggatggttatttctttccgggtggcacatccgttcagagctttttcattgatccgactgactgtacaaggcagtttgtgttttaatacaggtgctttgccaaacatgtaagtcgtgaacaggtttaaaatttcggggcggcgtttttgctcccattgttccttggtctgaaccatttctccgtcgtgacacattaatacggaaggtaaggtatattgcggaaccttactttcatcataattagctaatttggcatagtcttttctaggagacttcccattttgggcgtcagtataagttatactcaagaggagcataatccatatcattatgtttttcataagatccagtttttatagaagtttgataacgatttcttataattaaatttgttttacacctttcggaagtttcactttggttgcgattttaccatcggctttcttctcgtggctgacttctatcacgccccaaggggtgggataagtgcctttagcccattctaatttacctaggtgtggctcaatactgatctgcttgcgttccacgttcacgatttttatacctaatacatgatctgacagccatgtggtaggtcctgaggaccacccgtggcaaaggctgtgacggaatccgggatagcaataggcgccgaaatcgccatgtatgtctttttttccggctggaacagcttcgtctataggagcggcattaggaatccagtccagattgaaatcttcccaaaacgtggttgctcccaaatccagcatggccccccagaaagtgttaatgatatctattgctttctcatactcacctgctttggctaatgtttccagcatataatacccgtaaaaagtggaaaaaccttttccaccacctacagagacaacttcatcgcaagcctgttggggatccatcaatccagcgatggccattaatgaagctgcctgtttcagattgttgtgaggtaatatcttttttttcatccggttgataatgtccagacataattgagcatcagaagtgttaccaagttttaaagacaattgatgtgcatcttgcatagcccatacgatcagtgcgcgatagcctgcctcaactccggctttatttccgctggatggccagtccaaaaagcgggcaggtgctaacgtttcatttcccgcatcatccactttctcatttatcagatggattaatccgctgatatagtcggaatgtttctttaaaaaatcaatatcaccagtctggtgataccattcatattggttgatcagataccataggctgtatgcactcatgccattcatccaattgggtaatggaaattgtttgcaggccaggtccagactgttgggaattacctcattgtatccgaaaacacggctgacagccattaattcaggatgcatatcgcccagccagactacccggtcacgtttgatgccatcccataaaaactcctgcatattcaagtggacagtataggctccggtaatccatattttgtttaaacgttggtcgttgcattcaaaagatcccagataaggaatatcacggtagcgcaggatagctgaaatttcttttaaagagatagtggcgttgttttgcagcaagtcgaggcggacaaagcggaaaccggtattacctatttcaatcatgccgtcacggggaatttccatgatgatatcacgtttggcatgatcgtctgttgaaaatcccactttccattcggaatttgaagtggtactgttggcttctccaacagattctccgaaacgtattcttaccaaagaaggctccctacggttggaactgcccatgacgagctttaatcctccatgcagttcactgccgaaatccagtaataaggatgccttctctgtttcagtagaggtcattatgcaacatttttttctgttcatttccgattggccgtttccacgctctaacaaatagtgttcgttttttattagattattcttacatcctgcatatttggtaacaatacgtttgggggtgatgtaagcgcggtccatgatatctttggtcattctttgtgaggcatcgctttgtagggtgggagggatacctgcatatagaagtgcgggtaacagagcgaatgcaattatgctttttctgattgctggtaatagtttcatagtatctttgatttttgatttatgcaaatatagacgaagaaggtgtcttacctatggaattttattcatttacatggaatattgttcatcttctttctgttcttttttcatatacggataacaatctttattcgttgtgttggatttgtattggattttagttattgattggggggactgacagatagattctttatatgaaaagaaatgagtaaatgaactgtacagaacttgttgatatcacttttcttttataatccatattccttcaaaaaaaggagcctcacctcgtagctttccttcttctgttttatatagccgtgcgcttactatatcgttgatttgtattatataaatatctcctttttttgtgtagtggcttgttagaaccaatggtcctggtgcgacaaatcggcatagcgtgtcgttcaggaaatctatgtaatctatttgtggattgccatctacaagttcatagcgtatagttttttgttgtttgcatcccgctattaacaagaatagtgtagtgaagcatataaaccgaccgatttttttcattataaaataagtatttatggtgtggaaaataggggagtgctgaattcggcactcccctttattaattattgactgcaaaaatctagtctgttaatagccaggattttgcattgcggctttttcttcatcacttaaattcgtaccgtcttcatgttgaagttggtctaagaatgtttgtggaataggacgaagcaaatgtttgtctgctatattggcagctgcttccggattgaataatttagcacgttgaaccaaagtcttggtacggctcaattcttcccatcggttccattcacctaagcattcacgggtacgttcgtttaaaatgaaattgatcaaacggtctttgtccccatttacgcccatagctgatagaatagcttcatcctcggctggtaatgatgaataacttgaaatttgcagactggaagcatctgttgtgcgttctataccagttgaaagatagtaagtgttcttttgaaggaaagaagccttgaatgcctctgtgttattgatcttggtaccattggcatctttgcatttgcctaaagtgcttagtgcggttgaattatcttcgtcaccgcctgcgcttttcaagaaagccatagaaccatcggtgtagtattcgcggtcttcaccatttttccattcggcacgtgcacggagctggttgatggtagagatagcatcctggaagttaccggaacgtacttgagcttccgcttttatcagataagtttcgcctgtacgggccataatgacatcacgatgtgcgtcacctttctctgctgtacgcgatccgtcgtcagtcttattgataccacagaatacattggactgtgctggatttccgctaacaccataggtgttcaatacatattgaccaccggcatatatagggaatacattcggcacccatttatttgtttcggggtttacaaaggagtgggctataccaccacgacctactgttccataatcggagtttgtggcgtctttaaaacggttgtcactttttttattaagaataaagatgatgccttggtcgcctagtgttggaacctgatcggctgtaataccgtttgtagccactacatcatctgctttcgatgcaatattattcaatccgtagacagttttgaatgttttccacatacgtgagtcattcacattgtcgaagatagcataagcgtattctgtagggcggcaacgttggaagtccataccaccgatatattgaccacgttgtgtccaaccaccggagaagttggagaattgtgggttgaagtaattataagtacggtttccgaaacgtccggttgccgaagaagtgtgttggcatgacattaatatttcattagattcttcggctttgcagtctataccagtccatttggcgtaaaggttattataatcactttctaacggacattttgagatgacttcatcacataatgtaatcgcttttttcaaatcagcatcagcaggataacttgagttccagtcgctgcaacgttcagactgacggtacagcaaagcttttgccaggaagtgtgctgctgtgtatttagtccatgtacctgtaccacgccatctatctgtaggcagtttgtcgtaagcgttctgcaagtcatcaatcacttggtttaatgtttcttctgcagaagcgcgagtaaaggttctgaccacaccttcagtaacttgggtttgcagaaccacaccaccatattgtgcgaaaagacgatagtagttatatccacgtaggaaataagcttcccctaggcatttttcacggacttccgcatcagtaacatagtcagctgatgcgataacttgatttgcagaggcgatgccgtaatacatctgatcccaaagagccgatacacccggacagttgttgttggcggcaccgttcgccgttgtacagtccaacgggttcagacggctgtcataagtgttccatggttctgcagtcaggtcagagccgtttgtaaattcatcggtgccgtaaagggtaataccatacgcccattcataaccgaaatgccaacggatgttaccgtacagtgcggtagccagatcttgaatgccctgtgacgttttgaaatagtcagtggtataggatgacttgtttttttcatctaggaaactatcgctacaagaactgaaactagcagtcattgcgacagacagggcggctgtgaataatgtatattttaaatttttcattttaaaaacagtttaatgtgttattatcaaattagaaaccaacttgtaaaccgaaagtaaagcctctattgtaataagtagtgcctaagtccaaatccataaaatctactgaagaatagaggttgcctatattcttagcttgtgcatataatttaagagaactgattccgatgttctttaatgctttggaattaaagttataacccagagaaatgttacggatcttgatgaatgaagcgtctttaaagcctagcagacttgaataagcatcaccacccgctgtactgtaaattggtttttgataatcagcaccagtattgtctggagtccaatagtttatttcacgttggttatacataccgttttggccttcaccacccgtatcaactatataaccaaatcgtccgttcagctcgatacctagttcaagacctttatagttgaatgtattgctccatcccagcacccatttaggatttttattgccaagaataatacggtcattactgtcaataatatagttgccatcctgatcaacaggtttcaccatgcctgcttcaaatttatgtccattagcattaaatttagccatctctgccgcatcgctttcctgccacagaccatcgttggcaataccatagtaaacattgattgactcaccaatgaaccaggcattggaaatgtcatcctgcttaccgttagcaagttctaagatttcatctttttgataggctgcattgatagtggaactccattcaaagtctttagtttgtatgggaaccaggttcaaagataagtcaacaccgaagttttttgttttacctacattggcataagtagaattaaagccagttaaggttggaatagtcatgcttaataataagtcattggtgttagagtgataaatatccattgaaccgctgatacgtccattcaagaaactgaaatctataccatagttatattgtgttgtcttttcccaacctaaatttttatttgccatttttacttgagaagaagtgtaataaggttcattagtagcataagcaggggtcagagtagagccaaaaggtacatagaatgactggatgttacctaatgtagaatatgcacttacagctgagttaccagttgttcccaaaccgaaacgaagttttaactggtttatccaagaaatatctttcatgaagtcttcttggtcaatgcgccagcccaaggcggcagaagggaagaaactccatttgtgcccgtctgctaatacggaagaaccgtcataacgtccggatacagtcaataaataacggtcgttgtatgcgtagtttacacgtgccatgtacgatgccagctgattctcagacataccagtactcataccagcaccataagttgctgcatcagtaatatctacactgcccatgttgtaccattcaaaattttcattagggatggcgttagcactttcggaaccactttctttattatatttggaagctgattgcaataaggttacgcctaagttatgtttgccgaatgtcttgttatagttgatctgattatccagtgtccatgacaagtaacgatctgttgtatatttagcatagttttttgagcccatttttacggcagagtctttgctgataaaaataccttgacgatagtggcggaaatcaggaccgaaagagattttatagcttagtccctctagaggtgcccatattttcccaaaatcaaattgtccgtaaaagctgcctagtacacggaaagtttggcggttatcggttgacttattccattcgtcaattacagtataaacattggtggtggagccacaggggttggtaatgatatttccttcttcatcataaggaacaccaaagcgtggaatagcttttgccgcgctatatatatcaacagggcccgagcctgaagattgtccggtacgggaataaccatagtcttgaaccgcccatgaaccgttgatagatccgcccattttaaaccaaggttttacttgtaaatcgacagacattgaaaaattataacgttcatattcctgtcctttctgagttccttgattattcaggtaaccaacagagaagaaagcttgcgcagtttcgttaccgccactaccactgatggtgtgttcatgagtgatacctgtttgggtcactatgtctgcccagtcggtatctgttactttacttccatcccaagtaccgttactccaacctttatttacatttgccaaagctgcgggatcacctgatgctgcgaaataaatttggtctttatcgtagttaggttggtcaccgcgaggattgtttaccggatctgagttataataagcccaacggcgccaggtaatataatcgcttgcactcatggcaggtgatttgtcttttaggttttctaatgtgacagaacctgagtagtttaaagcgagtctacccgctttaccgcgtttggtagttatcaatatgacaccattggcaccgcgagaaccgtaaatagctgtagaagaggcatcctttaaaatatcaatggattctatgtcacgcggattgatcgtttcaattcctccagcactcaaaggaactccatctactacatacagagggtctgatgatgcgctgatagatcggttaccacgaatacggattgatcctacagtacccggacgttcacttgaggtgatatctacaccggcagctttgccttgtaaggcttcaaaagcattgttcacaggtcttgtattcaattcttcagaaccaacacgtgccatagcaccagtcacatcactttttttctgaacaccataacctactaccacaacctcatccagtgtttcagtatcctcctccaagattaccttaacggtagattgttctttcacctggatatctacggtcttgtatcccacgaaacttacttggatagttccattatcaggaacattttgaagtgtgaacttaccatcaaagtcagtaattgtaccattggtagtacctttcaccaccacactggcaccgattacagactcacctgtcttgtcaaggacagtacccgaaacggttttgctctgtgcaaaggcccctacagccaatacggataacaaagcaacgaagaacagccgctggaacttgtccaggcgacccaacagacttgaattctttctgtctttcatactttaattattaagttaaacaaaagttagaaagcagtttttttataggattattatattgataaacagtgagttatatttttcaacgactcatatattgaataaaaattaaatctatgttttctttttaatcacacatattctcaatctatattcttattaatcaagtatatataaattaatattctcatactattattattaatagcatattttatttcctttttgttgtattcaatatcgtgacttatctaattaatatcattcatataaacaatatatactacttacttctttgataaaaacttgctatggattttaaaatcatctataacagatgattgacgatagtttgacattacatcgattttttttaataactttaaagcataggaaagacgggaatgcgacccttaaaaatatttttatttttcaagtatgaatatacaaaatgacagcggaaataaaaaactaaaaactttatgatgactctttactatagttcttcttttaaaatagaatgtcctttataaaaatagaaaggattttggcccaaactatgattcgacatgattgagaactaaaactcaatcatcagatttgtatacttaatcaacagatgcttgatgcttattgggaatttaaagagtgtataaatctataataaaaaaagaagaatattttccgtattaccatgttattgactgaacgtcttgacatattcccatatgtactttttaataataatgaaacctataagttcctgtattatcccaataatggcctttattagatgaatggtgcctacatcataaataataattataccaagaacttcagaccagagactattaaccttataaaagatgtgactttaaatgaaatactaatatatggatttctcaaattgcttttaattgaaagatccatatatcagtatttcatttccctagttttgtataatatttttcttgattggctaagcctttatcgtttttatcggtaaaacttctgcaaatgcaatgaagaatccaatgttttaaggaagcataaaatcttttaaagccattttacaatgtatttgttcttgaccggaaacggtttcagaattcaaatatacatcgataagatcgtcatcattcatgcctttatcttgaaatttataataaatttctccaggcatttcaagacttataaacgaagaaattgagttattactactttgtatactattattaaaatacaaatttagattcaacttattattagaaatatctatatctttttcgccatcatagtataataaaaagaaaactggcttatataaatcatactcaaaagttggaacaatattcatataaccattttttatatagaatgctccggccgttttatctaatgaataaatactcttattttttagatggatagagtcttggccggatatttgatactcttcacttaaagtgtcaacatgaactgtaaaagtaggaatctgttggctcattccattcgtactgtttaatataatatcataagtttttccatcctccaattgagttatattttcattttcctccaatagattaaaactaactatggcacgttgtacttcttttaaccaaggtatacgattaagactttcttctgttggaactaaaattgcaccaaaatccgtgtataacttgtagccacgaatattgtctccactaaccgtaacatatacaccattaaatttagaccattgcgcatcatcgtcattactgagacatgagcaaaatagcccgatacaaactataaaaactacaaagaaaaagagaatataaaatctagattgtttcatgtcatttttataaattataatttaaaggtaaaagaggatgctttatacatattgatgcatcctcttattgtatatttattctattaccatcctgcgttctgagacaaattaggatttttcatacgttccgattgtggaattgggaagagatacattttatcattccaaacacgattgacaacgtttcgtttataagtgatagtaccatcctcattttttgtaagtttcatttctatgatgctctttaatttatcaccatctttccatcttctcagatcataaaaacgatgtccctcaaaagccaattctaccatgcgctcattctgatatttattccaaaaggcatctgccgacaaacctgttggaaattccggcattttgacatcagtacgattacgtatgatatttaccgcttcacaagctgtcatcccgaattcaccagcattatcagcagaacccgtatattggaatatggcttctgcatagtttaagtaaaattctcctaaacgataagtgatccatgaatggcggctggtttttgtagtactattggcactcagatcaatggctgaatccaaatattttttcaaataatatccggtaggagttgcacctgaaagaggttcagcattcaaacctccataaaaagtttcaataggattggtattctttgatggccattttgtatcgccattcttcacaatagtcatatcgaagcgtggatcacgtccgacatatggattagaagcgtcataaccacttcctgtttcattccacatttttccagtagctttcatttcataggcatcaaccatattttgtgttggacaattaccggaatttccacctggtactcccattggaaaattatattcttccaatgtgctgatgttaccattatatcgacgaacaaaaatcatttcattatttgaccagttgttaggtccccacaattctgagtacttacttaatttaaaaccgttagccgtacaagtttcaatcacttctttattagcttcagctgctctgcgccacaaatctttgttattttccggattaaacaatggactggcagcatataaagcagcacgtgcttttaatgccaaagccgcataacaagtaacacgaccgttctctgctggggcaattccgtccagtccgagttttgtgtagtctgcaggtaattcagtagataatttgtcacattctgctataatggcattaaaaatttcctgtgcaggggtgcgtgttagactgtttacttgatccgtagttaccatttctgtaaaatatggaacatccccataagcacgtactaaattaaagtaaaaatatgcacgcaaaaaacgagcttccttgaaactgttggtataacggaacatttgtgcacgatagtcatcatttaattttaattcatcaaatgtcaatccttgaaattcagccagatactgattacatatctgaattgctttatagctgctagtccagatattagacattggattagccggactccaagatccgtttacaaaatcacatatatcattgtttgtataggcatattcagcttcatcacaagcggatgccagcattccacctttatatgtttgaccaaagtcatagtctaatatggaataaacattggtaatcataccaattacattttcatagctttcatctatatagtcttttccgtaattggcatattcgtgataatccaggttacatgcagccaaagttaccatacatgccattccgctcactatttttttgattttcataatcatgtttttaatttaagttcaacaattaaaagccgatagttaatccagccactacactacgagttaaaggataagtcgctccataaacttcgggatcggcaatattaatcttatcaaaacacaaaaggtcaatacctctcacataaatctttgcattgcttaatattttgctttttttcacccatgtttgtggaaacttgtaatacaactctattgaacgaagtttcaaaaatgagcggtctgccaaccacaaggtattggtctgataattgttctcattactttgagagctcaaacgaggatatttagcgtcttgattttccggagtccaccggttatcataatattcctgtgaaatcgttgtattatttattaatggccagtataaactctttgtatttaatacagcagaatatcttcctgttccttggaacatggcatcaaagcctaatcctttccattccgcgcccaaattgaatgaatagtaaatttcaggagcagtcgtactataccctatagcaactttatcattcgcatcaatgatattgtcaccattgacatccttatattttatatcaccaggttttacatcaccaaatgactgcttaggactattctcaatgtcagcttgatctttaaaatatccgataacttccataccataagtttgcttcagagggttacctgtagttataagattgtcatacatacgcggttcttccatttgctcgataatctcatttttggctaaagcaaaattagctcctatatttaaagtaatgtcagcaatttttttgtggtaattagcaccaatttcaactccccaactatctacaatgccaccattttcataaggagcagtaaatcctaagacacttgaataatggccgcttgaagacacccaaatatctgaacgtctttcataataagcatcaaaagatacatccaacccattgaacatactggcatctaaaccgaaattatatttatatgctttttcatgagtagaattcaaagaagccagacgacctaatgaccaactttgcgttcctacagaataatttgtgtcaaatggataataaccaccgccaccatatgtttgttcccaatagttagtaacctcgttgtcatcatccaacggaagacggtcggtattaatgacgccaaacgaagctcgcagttttataaaattaatccaagaaatatcttttatgaaattttcttttgacatgacccaagctaaaccaacagtgggagatatagaccattgatgtcctggtgccaatttattagacgctgaagcaactacactcaaatcagcaaaatatttatctttgtatccataatgagtatagaaagaggcattctgacgataccaagtctgatcagtccctttggtattacggtattcatagtcccattttaattgactataaatcttattgtctttatttatttgtttgtcataaaataaagttgctgcaaaattgaatacccgtgtaaatgcaatacatttagcatcactactcatcgcactttctttaccatcagtataataagtcgtacttgagggtacgccattttcccatgcagttaccgaattactaccataaacaaaagttttagaatgattttcccaatattgggcatagttatcataagataacataccgcttgctcctagtcctggggttatagatgataaatcttgggtaagagtcatatcagcgaacaatgtacgttcgtggaactttgtgtaagccgccgcttgtgatacagctaaaggatttttggttccagcccaagtcgcactacctccccatgtaccattttccaaacgagcgggaaaagcagcggaaggtaaagtataaatcatatcccataaattagcacctccctgatcgtccgctcccggagtcctagtttctgacaggatacctaatacatttaatttcaattttgttttttctgttagatcaatatccagattagtacgtaaattggctctggagtattggtcctgtgtagaatatccatcattcatataaggattggcaataaatcctttattagtagtcaagttagccatggcataataacggaatttgcttgccccacctcggaaacttatattatatatattggtggcatccatatcacgataagtttctccaagccaatccacattagcataaagatatggatattgaccactacgaaatgcgttcagctcatcttgtgtataacgtgttgttaacccgtcatttaccaatgcttcattcatggcatttgcataagaataactgtctacaaacttgggtttgcgtgcctgccaaccgaaaccatgatcataagtaaacttgatttcacgtgtattataaataccacgtttggtagtgatattaactacaccattaatacctttatgtccgtaaatagctactgcagcagcatctttcaatatagtgacagtttctacctcttcaggagtaacatctgtaatatcacgttcaataccatccaccaatatcaacggattattggtagataaactttgtagaccacgaataaaaaatgtaggttcagcatctgcatatcgtccgctaccttgtaaagtagtcaagcctgtaccatatccaaaaagcgaattagctatatttttagcactacgcttattgaaatcttcattatatacggtagagattgatgaggtagattcttccagacgttgagctttatgatatccgatttctacaacttcatcggaatattttgccggtttaccggaagttatactatcattgagttcctgtgcatacccctgcatactcaaaaaagtaaggagtaccggaataattaatctattttttctcataataattaattcaaattgtaattgaagtattcattagttattaccatccgggattttgaacaagcccgtatcctttattaacttctgttgacggaaatggagaaagataccatttagggtcaaatccatttgtccaccaataacgagtagggttattcaattcaaatttttcatattcaaaatgggttggataagccatcttcccttcatcgtttccacgccaaggcaaatctcttcgtactccgttgtcatctaaacgataaatgaaaagtccatgcaattgcttttcaaatatatctgctcgtttatagcgaatcaagtcaaagaagcgtgcatcttccatacctagttcgcaagcacgttcacgaagaagttcttcaataaaagcatctttattactttgtaaatttttatctggattacattctgccaatcctttcattcctacacgtgcgcgtacaatatctacttgagctatagctttatccatactgcctcgtgaactttgacacaatgcttccgcataaattaaatgcagttcagctatacggatacaaggccaatgtacatatctacgcaacatatcgtttcccattaagaatttgatgggtgcatatcccgtagcgaatgaacctgtttgactggtaggaccattgccggcactctttccgcccaaccacgattcaaagcaataccccgacatatttcctgtagtccaatccaaagattcttgctggccatttacaatgatttcttcatacatacgcgggtcacgggtcaattctatatttattagtccgtcactggctgtgcccgttcctttcaaaaacatttcatccagttttccttcacttttagtcttatcccaatcaaacggcataccatctttccaaggaaacatttccatatattcttgtgtaggactgtaaccacgatgaatgctcataagaggatctccccattggtgccaattataatgacttgatttgaatgcatcaatatcaattacacgtgtgtttatcaatacttccgggctatccaaattagcatagcctgcacgatatgccaaacgataatcttctggacgagtacctttcgcccgctgtaaactatatccacctttagaagccagttcattaaagaattgttcacacgcttccagacagcgatcccatagttccggtttataaccaccataccaaatagcaggattgcctgtcgctcccgggtaataaggctggtcggaattaaataaaggtgaggctgcaaattgaagaatacgacatttataagctaaagctgctgctctagtccagcgtccggattcagatgcaggtgtttctacagtccaaggaagtacagcagcagcttcatccagcaattgtaccatataattcactgtttcttccacactgttacggggcatttcatagcttgtatctgtcccactgaatgtacctttaattaaaggaatgccaccataatgacgaaatacatcaaaataacgggaggcaagaatacatttcgcttgtgccaccatagaaactttttcatcttcccctaaccccggtacattatcaatattctcaatcaacatccatactccacgtacagcttcccagatattattccttaaataatcaaatttatcagaacgtttaccataattagctgtatgagtaccttgataataaggtccggtgataccggctgatggataagtatatatataaagatctgtcaatgcctccggtttgcccacgtaattattagaactttcctgattagctacatttttataaggaagcccataatattgcataccataaagattagtcagaaactgtctggtatattcagcattgttaaatacggtatcttttgtaaccgatcctcctggagccttttccaaaaaagagttgccgaacttgatttcatcgacacatgaagtagcgatgacagatgttagagccagtcctgaagcaacattaaaaatccatttattatattttttcatttgattgcattattaagattaaaaaccaagtttcaaactcaatgaatatgtttttgtcagcggataagagggagaattgctagcctttgattccggatcactccaaaaatatggagtaaaggtcaataaattatatccacttaacgctaactgcatagtattcagtttcagttttttcataaacggaagattgaaattataagcaatttgcagatttttcaaacgaagatacttagcatctttctcccacaaagttgattccgcatagttattggtatcgttgataaatgtcgcacgcggatattccgcatttggattcggattctctggagtccatgtatggtctaacatatattccaacaaacctccttgatctgagtttgtacggtctgtaaaaggttggcggaatacgcttgatatactgcggcttacattccatgcggcagtccattgcattgaaacatcaaatcccttccagctgaatcccatattaagaccggccatgtattccggatcatctgtgaaaccaaattgacgtgacatatcgttagaatctattttaccatcgttatttaaatcgacatatacacaatcaccattttttaaatcactgactaattgttctggcatatccgtaccatatacttctttgtaatgagtaggggttgtttccgaattataatattcaaagaatttatattggctgcgtgaaccaagacgacgtcctttttgatacatatattcttcattctgcggagcttcttttctctctaccacccgattttgattgtacatcaaattcaatcctacgttatatctaaaattgtcgcctatttgatcgttccattttaaagtgatttcccagccccagcttctcatttccccaagattagccaatggaggagtaaatcctaatacagaaggagccgtaccgtcactcaacataatgtctgtacgtttttcatgataataatcaaatgaagtgcgtaagcgatcattaaggaaattagcatctacacctaaattggttttcaacgctttttcccatgtaatatcttggttattctttccattttcataagctgcaggacttactgtggaattattgataccaaacaaaaaaccatgaccatcacggttaattaaagaagaattattaactacataaggatcagacatatagaggaaacgttgcttgtttccgtcaaaactatcattaccaactagaccgattgtataacgaaatttcaagaaacttactactgattttataggtttccagaatttttcctcactaacaatccaaccaaaagacccggccggaaaagtaccaaaacgtttgccgggtgcataattctcggaaccattatatccaatattgaattctgccatatagcggtttttccaatcataagttgcacgtcccactataccaaccataccacgaggaatatcagaatatgcactaggataatatatcttagactgattgtataacaataatgctgaaacatgatgattaccgaattcccgggcatagtttaaggctgcctccatataccaatcacgtgatttagccggatccttatcttcatatttcaactgagaattttgtccatatttcttgtaagcaatcgtaccatcttcctgtaatacaggagtataagttgcaacactagcactagcctgtgtataagatgtaaagccactattgtatgatcctttaatatggaatgacaatcctttagttataaaatccagtttttgttttaattggacatcagcatttaaggtgttattactggttcgcataaaacctccaccatagtatcccatgccgctaccaccagtaaaaggcattctcaaatccggatagtccgtacttgcattaaccagtttgccatcgacaagtcccggactagaaaacggagtggaataatacatgtttattaacatcccggcactaccctgtccagtataaggtttagaagcattattcacattaccagcaatattcattgataatgttgtcgttttggttacgtcaatatctagatttgagcggtaattgaaacgattatattgataagacagattatagggcaagtcaaattctttaaataaaccaccttgtgtataagctcctgctgaaataaaataacgtacacggtctgtaccacctgatatattaacattatgctgtgtttgaagggtcatatcttttaagcaataatctacccaatccacacttggaaaacgaacgggatctgaaccatctttaaatttctggattatttcatccgaaaacgtaggattcaaaccatcaccagtgtttatttggttataaaaagtggcatattgataagaattagccattttaatactttcggtcggggcaataatacttgaggaagtcgtaaatgaaatcttagcctttccttccttacctcgtttagtcgtaattaaaacaacgccattggcacctcgtacaccaaaaacagccgtagcagaagcatcttttaatatagaaatgctttctatttcattaggatcaatatcattcatgctacgttccacaccgtctacttgaataagaggagcagattgattccatgtagcttgaccacggacaaaaatattcgctgcatcacttcccggttctccggaatactgtacggtagtcaaacctgccatttgccctgataacatattagaaatggaccctgttggagtttttgtcaattcttcaccttttacgctggaaatagctccagtcacagaaacctttttctgaacaccataagctacaacctctacttctcctaacatttgagaatcatcctccaaaacaatttcgatattagattgttttacttccacagttttagaactatatccaatgaatgaaatcaataacttagctcctttaggaacatccagtttaaaaactccatcaatgtcggttatagtacctactgtctgaccttgcacaacaacattggcaccaataataggttctcctaaattatctacaaccttaccggtcactgatactttttgttgttgagcaatattgtttgcagctattgccgactgtcctcctaggggaagagccagaggacctgcaaacagactaaagagaaaaagccatcgaaatcttaatcgatgtcccaacagacttgattttttgctgtctttcatactttaattattaagttaaacaaaagttagttttctattctctcaggagaaataggtctcccacctgtgaaaaagtgttgcaaatatatgcgtgaatatgaaaaaagccaatgtaggattgtacaaaagcatggaaatttacgtcttttcaactgaaaaatagtacaaatgtctgtgaacaatctcaaaatggatagtctcacgagcatttttgttatacaagagtgcttttatttctgattgttactttaatattgtattgtaaaacgtataaactaaaatttgaatatggctaatctttcaatagtaattgtgcctgctaaaaaattatctaacggtagacatagagttaggatcgcagtagctcatcgttcacaaacgagatatatttcaacccaattcattttggattctgcaaatcaaatgaaaaatggacgagtagtaaaacacgaaaatgcagctaatataaattcttgtttgcgcaaactgattaatgaatacgaagagattctttcgtctattcattatcagtcgaccatttcatgcactgaattaatacatgtcataactcgggaacaacaaaaaaagggaataacctttaatacggtagtgaaagaatatctttcgatgatggaggcagacgatcgtaaaaaatcccataaattatataatatagcttgtgcaaagttccttaaacacatgaaaggtgattttcctttggtacaactcagtccgacacatatacaaagtttcgctgatgtaatgaaggctgaaggattaaaagaaacttctatcaggatttacctcactttaataaaagtaatattgaactatgccaggaaaatgaattatgtaacttatttagttcatccttttgtcttatttaaaatgccaattagtaatatcagagaactagatctgtccgttgatgaattaaaaagaatacgtgatgtaaaattattcaaatctgtgcatatcatggctcgggatatatttatgttaacttattatttaggtggtattaatctaagagacttaatggagtatgatttcactaaagggaactgtatgagatatataagacctgaattcaaacagacaatgcaacagtgtcgaattcattgttagttaataatttatatttttcctttggggtcatgtaacccaatctttttctcggtcttgagtttaagatgttttgaacgcgcattacctgttcattggttatgtccctaaagtccgtacccttcgggaagtattgcctaatcaaaccattgctgttttcattggctcctctttcccacgagtggtatggttttgcaaagtaaacaaaaatatttagtttacgtgcaatttcttcgtgaaaactaaattcttttccattatctgccgttattgtatgtatttggtctctaaaaggttccaaggcatcgatggcagctttagttagcgggctggcatctttcccgctaagtagtcttatccatactagtccagttaccctgtcgtttatagttaatagtgctcctttgtgattcattccaatgactgtgtcaatttccaaatcaccaaaacgtactttcttgtctactatcgtaggacgcttgtctatgtccacgcggtttttgataaaaccacgtccattagtcaatgcacctctcttcttatgacttcttccccgtcttcttaaatgcttgtataacaacttatctccatgctttttatcttcccaaatatactggtagattgtctcatgagaaactgtttccaagccctttgttcgcataaacccagtcacttgttctggactgaaatctttctttatgagtatatctacttgaattttcaagtcgtccgtaaacttcacgaagtgctttcgtgaacgcattctggacatatacttagcctgagcgagatccggtttgtaaatgccattacgtttatcactattacgacgtaattcacgacttatagtgctacgatgaactcctacaagattggcaatctcggttcttgactttccgctttgcagataagcggaaatgttatacctttgttcttcggttagctgtttcatattgcaactgaatgttggggaactggaagatgcaaagaaacaacttttccacaggggaacaaaagggaaagaaatcttctttctctgttcctctgaaaaattattcttttcgtatcttctcattgtcatcattctcactcctgttgcattatccgcttgaacttaggagacataaaacccgtaatagcaaaaagaatgaaaatgaaatagctttcactatccagccagaagcacaggcaattattgatcgatatatttcagaaaatgggaaattagtttttggcaagtataaatcttatgaaaaagtatatagtttggtctttagacatatagggaaagtggctggtctagcaggcataaatagaaaggtttcatattattctgcaagaaaaacatttgcacaacatggttatgatataggtatcgaaatagaaaaaatagaatattgtattggccatagcatgaaaaacaatcgtcctatatttaattatatacgaataatgcaggagcatgccgataaggtttttagagaaatcttcgatcaattgcttaaatagccaattctattattatatatgcataaatgctttttcatttcatgtaaatgttattattgtattaccttaaaaagcaagtatgcttcgtgagccaagtaaatgtacttaaatggctaatgaagtacacttactttttaaggatatcttttaagtttatgctaggacataaactgcttcatataaattggaacgtaaagcaaaatatttcataaaaaccaactaaaagagatttttttcaaacagcaataagagctctttatattctctattattgtatcatctatattacaaaattcgatgaaatgggcttttttcgatacttctatacttatatatcaagttaacttttgtttaacttaataattaaagtatgaaagacagaaagaattcaagtctgttgggtcgcctggacaagttccagcggctgttcttcgttgctttgttatccgtattggctgtaggggcctttgcacagagcaaaaccgtttcgggtactgtccttgacaagacaggtgagtctgtaatcggtgccagtgtggtggtgaaaggtactaccaatggtacaattactgactttgatggtaagttcacacttcaaaatgttcctgataatggaactatccaagtaagtttcgtgggatacaagaccgtagatatccaggtgaaaggacaatctaccgttaaggtaatcttggaggaggatactgaaacactggatgaggttgtggtagtaggttatggtgttgttaaaaagagtgatgttacaggagcgttgacaaaagtttcagagaagcaaataaaagagcgtccagtgcaaaatgctttgcaggctatgcaaggtaaagctcctggtgtggatattacaacaaatagccgaccaggtgaattgggagatgttcgaattcgtggtaatcgttctattactgctgataatgatccgttatatgttattgatggaatacctatggttgccggttctattgctgatataaatccgaatgatgttgagtcgatggaaattttaaaagatgcttcagctaccgccatctatggttcacgtggagcgaatggtgttgttttgataacaactaaaaaaggtaaagttggtaaggttagtattaattatgatggaacggtaactttttctaaaatccattcgatgacagattggatggattctggcgaattaatcgattggaaacgtcaagcttatattaatacaggagcatattcaggtacatatggtaatgctcctgatcctaatattgatggtgatttattgttttctgacaatggtggaggtgtatctaattatccgtatttgaatcaatattttcagaaagcatgggaatataatgcggatggttcatataagatgcgtccggctacagattatgaaaaagaggttttaggatatgctgatcaagtacctgtatataattctgcaaatattccaactacaccttggactgattatgtgacacgtactgcgattactcataatcatcagatttcgttgtcagctggttctgaaaaatctaatttgtacatttcattggcttatttggatcaagagtctccgatgaaagatcaagattttaagcgttatacggcaaatattaatggtgaaattcaagctacaaattttttaaaggtaggtatgggtatgaatgccagtcattctattaagaattatggtattattaataatacttctaattcaacctacaaagattcttatggctatgctgtggctaaaatgccattcgcccctgcttatgatgaggagggcaaaccattgaatgtagatggaggtccgtcacagtataatccgatgttggatgtatatcaggcaacgaatgaaactcgttattatagtgttatgtttaattcttatggagaaattgattttggtaaaatctggtcgccggttgaagggttaaaatggcgcacaaatttaggtactcagtatcgcaactcacgttatggaagctattatggaaatgatttttctaatcctttgaagcattctgcttatgctgctaatacagcctttaatcagcaaggtcaaaatttgtcgtggacattagaaaatctaatttattacaataaaatattcaagaatatccattctgtgggattaacattgatgcagtctgctgagtattctcgtgctgagggattggaagtacgtgcatataattgtacatttcctacggcattatggtatagtgtgggtaattccgatttgacaatggatagcccaggatcttcatttagcgaacaaaagcgtgcttcttatatggctcgtatgaattatggattgatggataaatatttgttgactgttactggtcgatgggatggtgcatctatgttggctgttggtaataaatgggattttttcccttctgctgcattggcatggaagatgaatgaggaaaactttatgaaagacgttaaatggatcaatcaattgaaggttcgtgttggatacggtgtgacaggtaatgcatctataaaaccgtatcagacttctggaacaatgacagcaagtggtgccggtaagttttttggggtaggtaatattactcaagttactattggtgctaaagcttctgtattacctaatttggatttaggttgggaaaagacagcgtctaccaatattggtgttgattttggctttcttaacaaccgtataagcggtagtgtggaatattatgtggctaaaacttcggatttgctgcttgctaaatcattacctttgatgactggttatacaagtattactactaatattggtaaaacacagaacaaaggacttgaaataacattgtctacaactaatattcaaacaaaagattttacatggaagactgattttacattctctactaataaagaagaaattgtggaattggcaggaggaaaggttgatgatacagcaaataaatggtttataggtaaacctaaagatgaaatttggactttgaaatatgatcgtttatggcagaatactcctgaagatttaagaactttggaattatatgagaaaatatcgaagactgtaatgcagcctggaatggcgaaagttgtagaccaaccattaatagaagttcccgagggtacggaaggagcaaaaactgtaacattgaattctggcgaaagagtgacttatatggataatggttttggtactatcaatacagaagataataaatttcttgggtcattccaacctaaatggattggtggctttactactacatttatctataaaaactggcagttgaattcatttgtttatgctcgtatgggcaatatgtattatggattgttacaaacttatggtcgtcgtgtagaaaaggacgtatggagtactgaaaatccgaatggaaagtttccacaacctcgttctggtggtgtaactactacagattatagtgcttatatgaactatactaaaggtaatatggtagcaatacgtaatattgctttatcatatacgttccctgaaaagtggttgaagaaacttggggctgctagttgtcaaatttatggtcaagtattgaatccatttatatttggaggagaattagtgaaatcgggtataaacccagatgatacaacaggatggagtgaaaaaacaaatgacactaattttattggtggtcaaacaaacaataccatattgactcgtagttatgttatcggattaagacttggattttgataaaccattaaaagacctgaattcaaacagacaatgcaacagtgtcgaattcattgttagttaataatttatatttttcctttggggtcatgtaacccaatctttttctcggtcttgagtttaagatgttttgaacgcgcattacctgttcattggttatgtccctaaagtccgtacccttcgggaagtattgcctaatcaaaccattgctgttttcattggctcctctttcccacgagtggtatggttttgcaaagtaaacaaaaatatttagtttacgtgcaatttcttcgtgaaaactaaattcttttccattatctgccgttattgtatgtatttggtctctaaaaggttccaaggcatcgatggcagctttagttagcgggctggcatctttcccgctaagtagtcttatccatactagtccagttaccctgtcgtttatagttaatagtgctcctttgtgattcattccaatgactgtgtcaatttccaaatcaccaaaacgtactttcttgtctactatcgtaggacgcttgtctatgtccacgcggtttttgataaaaccacgtccattagtcaatgcacctctcttcttatgacttcttccccgtcttcttaaatgcttgtataacaacttatctccatgctttttatcttcccaaatatactggtagattgtctcatgagaaactgtttccaagccctttgttcgcataaacccagtcacttgttctggactgaaatctttctttatgagtatatctacttgaattttcaagtcgtccgtaaacttcacgaagtgctttcgtgaacgcattctggacatatacttagcctgagcgagatccggtttgtaaatgccattacgtttatcactattacgacgtaattcacgacttatagtgctacgatgaactcctacaagattggcaatctcggttcttgactttccgctttgcagataagcggaaatgttatacctttgttcttcggttagctgtttcatattgcaactgaatgttggggaactggaagatgcaaagaaacaacttttccacaggggaacaaaagggaaagaaatcttctttctctgttcctctgaaaaattattcttttcgtatcttctcattgtcatcattctcactcctgttgcattatccgcttgaacttaggagatattgaatatgaaactaaaaaaatatatgttgatttccatggttgctgttactttagcatcttgtggagatgattttttggaagaaaaaatggtagcaaccattacgcaagattattttgaaacagaaacgggggtagagcagttaattgttagcacttatgatgcgttacgagtgactaaacagtaccaacaaggaccttttgctttttttacgggtgttgataatatgatggctaaatctgccaattatgctatttattcaggatcagtttggacttctactggtaatgaagcaacgtatgttgatggattatgtggtgagtatactagtaatcaattgttgggtttttatccttgtattaataattgtaatcgtgcaattctttctattcgtgaggggaaagttgatggtaaatttgcttctgatcaagcttatgcagaacaacgaatggctgaagcaatgtttaatcgttcctattgtatttatttgatgaatacgttattgggagatgtttatgttccaagggggtatactactgctttacctgaaaattatgcatacaatcgggaaacttcggaaagtctttataaattgatgattggagatttgcgttatgcttttgaaaaattgccgaaagcttccgaacaatcaggggctgattacggacgtgctacaaaaggagccgccgctcattttttggcaaagctttatttgcaacgtgcacaaggggctgattatggaacagcagaatacggacgtaaggcggatggaagtattgataattctaatgagaagtcatatttgggtatgctatacaaaggaaaaggcactgctgacttagattcttgtatttattatgctaattatgtgattgatcaagatggacactattcattggaatcggattacggaaaattgtttagccatcctttggatgattattcaaatgaggagagtcgtgagataattttagcttgtgtatatggtatgcctgctaatagtggtacaaatggacgttatgggaatcgtttgccttattttttaactcccaattatacaagtgcctcgtggggaattcctaattttacttgggaatatccaggtaaaggtaatgggcattctgtttcgcctactgattttggctacgatgtttttactaacaaacaagctgattctcgttttcaaaaatcattttatttggaatatcatacatcattaaggggtggttctaatacatcgactccggcagcagatgttccttattacgcttatgatagtgaagataatgctacatatacctggacatcagatatggctgatttttttaattctaatatattgcctaattataatcgtgattcgtggggtggtcgtcgagctgtcgcaggagagcataagatgggggcaggtgatatggcgtttgcttatttggaaaatacaaaggaaacagctattgatattaaagaagcgttagcacaaccttttgtattattggcacgttggattaaagatggaaataaatattattatcgtgctccaataaagtcggatggcagttcgtatgcttataataatgcaacatatgtagggttggataaagtttcgggaacaggagggccgactactgctaaatacactgatcctaatagaaattcttatgattcatactattcatcgcgcgacattcctttgttccggttagctgaaacattcttaatacgtgcagaggcttatggacgtaaaggtaatttctcggctgctgtcttggatatcaataaagtacgtgcacgtgctgcatttaaagctggtgaaactcgaaatgaagtgttggctcgtttgtatccgggtagtgagaatttggctaaaacagagagagaatggccttatattgtaaatacagatatgacttcttccatgttggttgatgaaagttattggacaggtggggtaaatgctgatgctgagaattatcctgttactgctacctctatattagatcgttttgtcaattttatattgaatgaagttgcacgtgaagcgaatacagaatttatttattatgaatggttgcatcattctggttggcaggctgatcgtataatgtatcatgatcaggtaggttcaccattaactgggctttgggatagtgctgataatttggtgaatgggacaggacctacaggtaatggtttgggagcatttaaacctgcttatacattaaaaccatttagacagtcattgcttgatttattgactgacgaaaatggggctttactggatgcctctgctaaaaaagcttatcaaaattatggttattaattagttgaatctaaccatagcaaaattgcctgtcattactattaatgatgggcaatttttaaaacatttacaatgatttcgtgaatctttttaagatcataagatttgggaagtgattgtagatgttttgttttgagataacgtattaaatgtgtgaaggtactgattatacaaaaatacatgtataatggataaaattctattggatgccatgcgattgattcttatctttgtgtggtaaatagtatattggaaaaatgataaaaataataatttttttactgttatatgtgcccctagagagcatagcagctgatgatgaagaggtaaaagtgagtattgcccaatataggggaggaagagatgctgcaatcagttatacttttgatgatggtttgttggaacaatatacattggtttttccggaattggagaaaaggaatataaaggctacattcgctgtgaatggaggttggatggggtgtattagtgcaaagaaagtatgtatgtcttgggaacaagcaagggaaatggcacaagcaggacatgagataacaaatcatgggtggatgcataagaatctgacgaaattggtaggggaagaaaggcgttttgaaatacaacataatgatacggttatttttgagcaaacaggtatatttccgcgtacttatttttatccgggaaaccggaaaaatgaggaggccatagcttgtgcatcggttgacagagtaggtactcgtatccgacaaatagatataggttcacgccgtaatgcccggtggctaacgcagtggacggatagtttgatagcaaacagattgtggggtgtcggtatgacacatggtatagtaacgggatatgatgcttttcctgatcctcaagtgttttggaatcacttggatgaagtgaactgccgaagagacagattgtgggttacgacatttcgtgaggtagcggcgtacatggctgaacgggagaatttggtactggatataaagaggacatcaggaaaaattacagtgacttttcattttacaatggacaaggaattgtttgacatgccgttgactttgcttttggaagatttgcccgatcagtgtgctgttactgttctgcaggatggtagaaatttgcctgtgaacttgtgtcgtagaggaatggttgtggacttcagtccgtggggaggaccagtagagatctcttatgcttcttcaataactaaaatcagataaagtgaacaattaaccatataaatggataaaattctatttgatataacttctctcgtgcataaatttgtcgtatcagataaaaaatgacatgctatgagaaagacatttttagctattacattatttttagcttttagtaaagccgcattggctcagtttggaaactgcactgcatcggaaatgcggacttatgtagatagtgcgaccggcaatactatcactatgttgaccgatacgatgaagaatgaccgttttctttatcagactgatcccatgtggacagctgatggcaaatatttattgttcaggtcttccagccgtggaaatgacaaagaggtagaaagtacgcttcctaacggagaaaaacgtaaatggactcctacacaaatttattttattgaaatggccaccggtaagattattcaagctacggaaggaccgaacttgggcagtgcttttttggctaataaaacgaatcgtatgtttgtcagccggaaagaaaaagaaaactggaacatgtatgtgatggacttggataaattctttgccgatgtaaaacaaggaaaaataggtaaaccatccgcttatgaaactttcataggcacttttcccacagagatgggacgtccgggaggatatgctgtggattgcaatgatgattatgcctacataactgttgagcgtgagggtacggaagaggaaaaggaacgtatgatgaaaaacgctttcctgcctgaaagtaaccagccggtaaagataaagccaactctttgcggaattcgtaaaatgaatctcagtacaggagaagtaactaaggttattgatacggaatttaaaacaggccacatacaagccagccgttttactccgggtgaaattgttttttgtaacgaaaccggtggcgatgcccatcagcgtatgtggttttgcacggcagatggaacggtctttaaacctttatataaagaaactccgctagattgggtgactcatgaaacttttgcaaccaaagattttgtatatttcaatgtcttaggatttcagccgcgtcttcgcaaacaggcaagtggtattgtgcgtatcaatttgcgtacggatgatgtagagttgatagggcaggtagaattagaaaaagaccgccaagcgattgatggccaattggtaggaagaggtttctggcattgtaatgccagccgtgataataaatgggctgccggagatacttttggaggtaatgtatggctgattaatgtgcaaactggagaacgtcattggttggtttcggataccaagatgaaaccggatcatgcacatcccagctttagtccggatggtacgaaagttcttttccaatccggatattttacaaatggaaaaagattaaatttaatgatggtggatatttcatcttttaaataaagtaaggttggatatgaaaaaaacacgtaagatattattttccgcagctttgttgtcttcagggcttacgatggcccagactacaacggcagagaaatcgcccaatgttatttatattatggcggatgatttgggcataggtgatttgggatgctatggtcagcgtcagattaagacaccgaatattgatgggatagctcaaaacgggatgaagtttatgcagcattattccggttctacggtcagtgctccgtctcgttgtgctctgattacaggaaagcacatgggacatgccgcaatcagaggcaatgcaaaagtggcaggttcggatggattgttatatgaaactccgctgcctgccggtgaagttactgtagccgatatttttaaaacaaagaattatgttaccggatgtgtaggcaaatggggaatgggaggaccgggtacggaaggtatgcccggcaaacatggttttgattatttctacggttatctggggcaacgttttgctcatagttattaccctgagttcttgcatgagaatgagcagaagattatgctggatgggaaatattattcgcatgacttgatgttggaaaaggctttgaattttattgatgaaaatgcgcagaaacctttctttctttatttttcaccaaccatacctcatgcagatcttgatataatgggagaggtaatgacggaatatgagggggaattttgtgaaactccttttggaggaagcaaagacggttataaatcgcagcaaactccgcgtgcggcatatgcggcgatggttacttatttggataaaagtgtgggtttgattattaaagaattaaaagagaaaggtttgtatgatcatacgataattgtttttacttccgataatggagtccattcggagggagggcacgatccatcttattttgacagtaatggtccgttcaggggtcagaaaagagatttatatgaaggaggtatccgtactccgttcgtcattcaatggccgggagttattccacaaggggtagttactaatcatatttctgcattttgggattttttgcctactataggtgaattggtgcaggcggatattcctcaaaatattgatggtatatcttatttgcctactcttacgggaaaaggtattcagaaggagcatgattgtatttattatgagttctttgaatttggaggaaagcaatctattatgacacctgatggttggaagttggtgagactggaagttagtgactcgtctaaaacttatgaagaattgtataacatttatacagatccggcagaaactactaatgtgataaagcaatatcctgatgtggcaaggaaattaaagaatatgataggtggtcaacgtgttgaaaatgcccgtttccatttttaaacaagtaagatttatgaatcaatccttatttttaaagaaatgcagtaagttctgttatgtactttttgcagtttgtggctgtttggcttgtacacagaatcagaagattgaatggccgcaagtgactaacgagaccaagccttggacgcgatggtggtgggaaggcaatgcggtcaggactactgatttggatacggttatgcgtaagtaccaggaggcaaatctggggggattggagatcactcctatttatggaatacatggttatgaggaccgctttaaagattttctttctccggaatgggttgatttgtttctgtatactttgcaggaagcaaagcagttggggttaggtattgatctggctaatgcttcgggatggccgtttggaggaccttgggtcactcccgaagatgcgtgcaagacggtggcttataaaacttatcaattgaaagaaggtgaacaattgggtgaacctgtccggtataaagaagaaggctttgtcagattggcagggcatactccggtaaaactggcggatttgaaagaaccagtcagtgcgaatgctgatttacagacattggcattggatcaggtacgatataaaaaggaactgcctttgattatagtgaccgctaatagtgatgaaggtgaatgtctcgacttgacttcaaaaataaagccggatggtacattggattggacggctcctcaaggtgactggactatttgtgctctgttccaaggtcatcatggaaaaatggtagaacgtgcagggcctggtggtgaaggtgatgtgatagatcatttttcagcttcggccattgatcattatctcagtaaattcgatgaggcttttaaaggaaaggatatcagttatctgaggtattattttaatgactcttatgaagtggacgatgcaagaggcgagtcgaattggactcctgctttttttgaagaatttcaaaagtatagaggatatgacttgcgtcagcacttacctgcattgttaggtattgacacaccagataaaaatgcaagagtgttatatgattatagacaaaccataaacgatttattgataaatcattattctattcgttggcaacattgggcggcaaaacaaggaaagggtataaggaatcaggctcatggctctcctgccaatattctggatttgtatgcagtgagtgatgtacccgaaatagaggggcgtgatttagtcagtataaaagcagctccgtctgtagctcatacagaaggaaagaaactctcatcttcagaaagtgcgacttggttgaatgaacattttcaatcgaatctgggagatgtaaagaaagcacttgatcttttctttttggggggtgtgaatcatattttttatcatggtacttgttttagtccacaggatgctccttggccgggatggttattttatgcggcagtccattttcatccgaataatccgttttgggaggattttaaatatttgaatcagtatgttactcgcgtgcagtcatttttacaggatggcactcctgacaatgatgttcttttatactataacatagccgatgtgatgtctgagcaagggaacagaagccttcaacactttagcggattggatcgtaatatgttggaatcttcggtcagagaaagtgcggtaactttaacagagaatggttatgcatgggatatgatttctgacaagcaacttcttaaaactaatattgagaaagaaatgattgtaacgcctggtgccgcatataaaaccgttcttgtttcggcagcgcaatatattccttatgaaacaatggaaaaactgatggctttggctgatgaaggtgctaccgttgtgttttataagggaattcctcaagatatggccggaatgattctttcggaagaaaaacaggctcattttaaagaaatgttggatgctttggactttcatgctgaaggtgctgttaaatgtgctcgtgtaggtaaggggaaggtttgtttgtcagatgatattaatgctctgatgaatgaggcgaatgtgggtgctgagaaaatgtatcaggcaggtctgcaatgtatccgaagaaatagtacgacgggaaaatattactttatagaaaatagtagtgaccgtaaaatagaggattggattccacttcgtacagaagctcggagtgcggcgattttcaatccaatgactggtgctagtggtttggctactatgaaacgcaatgacgggcaaacagatgtttacctggaattgaatccgggtgaaactgtcattgtatcaacttccggtcagcattttacaggagatgcctatgcttattatcaaaatgcaggtgagccaaatccagtttccggcagttggactgtttcttttgttcaaggaggtcctcaacttcctgcttctataacggttgacagtttgggctcatggactgattttgtaggggatgaatataaagctttttctggaacagccgtttatacgactactataaataaggtgcctgtagcggatgtgatcaaattgaaccttggaactgtggcagaaaatgcatctgtctatttgaatggagaatatataggtacagtgattgactctccttatcaattgtatatccctgctgaaaaattcaaaggacaggatgagttagttgtcagagtagccaactctatggcgaatcgaattgcttatatggataagaagggagtggactggaagattttctataatgtaaatatgtctgcaagaaaaaaggaaaatgtgaaaaatggtatctttgatgcttctgattgggaaccaaaatcttcagggctattgggacctgtaacgttgactccggctatggtgaagcaatgaattatatagtcctgatgttgcaacctatagaataaatgtttcagggtatttgtgtaatatattgagtattaatgtgatatgtaaatatgtgcaacatgaataccctgaaatttcgttttgaacgaatttctatataaatgtatcttattctatggtatgagagggaactttatgctagttttgtaacaaacaatttgagataactatgagaaacaaaattcttttatttttattggcttttataggaataagtcagattgcggcagcatcagctgttcgtgataaatacaattttaattctgaatggttactttatgttggcgatataccggaagccaaagaagtacgttttcaggatacggattggaagaaagtaacattaccccgtccttttaatgaagatgaagcttttcgtttaagtatagaacaactgacggatacaatcatgtggtatcgtaagcatttccgtctgcctgccaatagcaaaaacaaaaaagtttttgttgaatttgaaggcgtccgtcaaggagctgatttttatatcaatggtgaatatatcggcttgcatgaaaatggtgcgatggctgtaggtttcgatttgactccttatattaaatatggacaagagaatgtaatggcagtccgcattgataataactggaattataaggaacgtgccactgatactaagtatcaatggagtgaccgtaattttaatgccaattatggagggattcctaagaatgtgtggcttcatgttactgataaactttatcaaacacttcccttgtatagtaatttgaaaacgaccggtgtctatatctatgcggaggatattcgtgtaaaatctcgtaaagccgtagttcacgccgaatccgaaataaaaaatgaatataatcgggataagaaagtcgcttataaggttgaagtgtgtgatcgtgacgggaaaagtataaaaagttttgagggtactcagacggtagtaaaaccgggtgaaactgcgactttggaagcttcagcagaaatagacggacttcatttctggagttggggatacggatatttgtacacagtaaaaaccagtttatgggtggatggcagaaaagtagatgaagtggctacccgtaccggtttccgtaaaactcgtttcggcaaaggaatgatttggttgaatgaccgggtgattcagatgaaaggttttgcacagcgtaccagtaatgaatggccgggagtcggtatgagtgttcctgcatggctgagtgattatagcaacggtttgatggtggaagataatgccaatttggttcgttggatgcatatcaccccttggaagcaggatattgaatcgtgtgaccgtgtcggattgattcaggcgatgcaggccggtgatgcagaaaaggaccgtgaaggccgtcaatgggaacaacgtacagaattgatgcgtgatgccattatttacaaccgtaataatccgagtattttattttatgaatgtggaaacgaatcaatcagtcgtgaacacatgatagaaatgaaagcgattcgtgataagtatgaccctcatggaggccgtgccatcggttctcgtgaaatgcttgatattcgtgaagccgaatatggtggcgagatgctttatatcaataaaagcaaacatcatccgatgtgggccatggaatactgccgtgatgaaggtctgcgcaaatattgggatgaatattcttatccatatcataaaaatggggaaggaaataattcattccgttctgcaatgactaataaggtccagaaaaaggtggatgcccgtgcttataatcacaatcaggattcctttactattgaaaatgtaattcgttggtttgattattggcgtgaacgcccgggtacaggtgaccgtgtcagctcgggaggtgtgaaaatcatcttctcggatacgaatacacattatcgtggtgtggagaattatcgtcgtagtggtgtgacagatgccatgcgtatccctaaagatcctttctatgcacatcaggtgatgtgggacggatgggtggatatagagaatccccgtattcatatcgttggtcattggaactataaagaagatgtggtgaaacctgtttatgtggtatccagtgctgaaaaagtggaattgttcctgaatggtaaatctttaggaaacggtcaaagagattatcatttcttgtatactttcaaagatgtggcatttgttccgggcaagttggaagctgtagggtatgataagaatggaaaagaatgttgtcgcgctgaattgcagactgccggcaagccggaacagattaaactcagtgtgattcaaagtcctaaaggctggaaagcggatggagctgatatggtattgcttcaagtggaagtgatggataaagatggcagacgttgtccgctggctaatgatctgatacattttgatgtagaaggaccggctgaatggcgtggtggaatagcacagggcaaagataattatattctttcaaaagatttgcctgtagaatgtggaatcaaccgggctttgatacgctctcttacgactccggggacagttcgtataacagccaaggctgatggattgcaatctgccgaaatcagtctttcttctgcacctgttgaagtgaagaatggcttgagtaactatattccgggagatgaactggagggcaggctgacccgtggagaaactccgttgactccttcttacaaggatacgaaagtcgatgtgaatatcttatcggcggttgccggagccaatcaggatgaagtgataaaaagtttcgatgataatgaattgagtgaatggaagaatgatggcagactgaacagtgcatggataacttatagtttggaacgtgcggcccgtgtggatgaaatttgtatgaaacttaccggttggcgtttgcgcagctatcctttggaaatatatgcaggtgatgaactgatttggagtggtgagactgaaaaaagtttggggtatatccacctgaatgtaaaacctgtattgacaaatgagataaccattcgtttgaaaggtgccagcaaggaaggtgacggtttcggacaaattgtagaagttgctgctcctgccgcaggtgaattagacttgtttaaggcaaaaaatggcgataaaactaatcacgagttacgcattgttgaaatcgagtttaaagagaatttgtggcaataaaaacgaaaatattggataaatcggatattttcatgggttaaagattggtgaacaggaatttcttttttaagtagataggtggggagcctccccacctgtattaaggttttataaattgttagatgaaacattggattatgatgaatatgcttctgcttgtcggaagcatattcgctttttcccaaccttacagtggagaaaagctttcaagaggattgattggaattcctacagaggatggaatgtattttagctggcgcatgaccttggaggatgcagccggattacaatttgatttataccgtagttccggtggaggtgcggaggtgaaattaaataaagaaccgatagatcggacttccgattttttagaccgtacggttgattatacggtggataatcgttggactttaaaagcaactaccggggaagtcgctatctggacccgtctgaaaggagaggaacggaatccttatttaagtgttcctgtttgtaaaccggaagacggagaaatagcaggtgaatcattcacttatacagctaatgattgtagtgtaggtgatctggatggtgatggagagtatgagattattttaaaatggtttccttctaattcaaagcgaccgccacaacgtggctttaccggtaatacctatttggatgcatataaaatggatggaacaagattgtggcgtattgatttgggaccgaatgtacgttccggagcagccactactaatttcctggtctttgattttgatggagatggatgtgcggaaatctgttgtaagacaggagatggtactgtcgacgggctgggacatcggataggagatgcccaagccgactggaggacatgggataaaaaaagttttacgtatggtaagatagtaaatggcccggaatacctcacggtttttgagggacgtaccggaaaagaactggattcgaaagaatatattccaacccgttatcccttggatggttggggaggtgtcggtggcaattgtggtaatgacaatactggtggtcgttcagaccgttttacagctggagtagcttttctggatggaaaaacgccttcacctgtcatggtaagaggatggtacggacggacggtggtggctgcatggacttttacaaacggggcattgaaacatacatggacttttgatagtgcggcaccgggttgggaggcctattcgggcatgggaaatcatagtgtgaccgtagcggattttgatggtgatggttgtgatgaaatctgcgtgggggctatgactgtagaccatgatggtaaaggactgtttactacgggcttgcgtcacggagatgctttacatgccggacgttttattccttcccgtcaaggtatgcaggtttttggcgtgcatgaaaatgaaggcgataatgaaattgtaaagcgtactcctgccgtagctatgtttgatggagcgaccggagaaattatctggcaggatggtttgggacaagatgccggtcgtggagtagctgccgatattgatccgcgttatgatggagcagagtgttggtgcaacataggaggtttgagaagaggggataccggagaaataatcagtaatagaaagcctgactcctgcaattttaccatttattgggatgccgatcccttagcggaactactggatcatgtttccatcagtaaatggaattggaatacggaaagtacagatttattattgaaagccgagggagttgtttccaataatggaacaaaaggtaatccgtgtttgtcgggtgatattttaggagattggcgggaagaggttatttgggcctccgaagaccagacagaattacgtatttattctactaccataccggctgtggacagacgtgccacatggatgaatgaccgtcagtacaggttggcgatagcttggcagaatgtagcgtataaccaaccgccgcactctagtttctagccttgtcgctactctgattaggatatatgtactattggttgaacgaataaacaggaaaatgaatgaatttctattctccggtttgttcgttcatcttatttttgtgaaagatttgaaatgcaataaaagaaaaacactataaatgtcatgaaaggaaataaactttgtttatgctttttgttagctgccggagtaggattgggagcacatgctcaagataaaatagctgctccgatgaaggatgtgaaccaagtcgttgataatacgcttgatagtttaaatgtggtgcgttccgcccgtcctgtttcaggttccagccggaaaggggataatccggtgttgttccttgttggaaattcaacgatgcgtaccggtactttgggcaatggaaataacggtcaatggggatggggatattttgaacacgaatattttgatgaaaataagataactgttgaaaatcacgcattgggaggaaccagtagccgtactttttataaccggttatggcctgatgtcttgaaaggagttcgtaaaggtgactgggttatcatagaattggggcataatgacaatggtccgtacgatagtggccgtgcccgtgcctctattccgggaattggcaaagacagtctgaatgtgactattaaagagacaggagcaaaagaaaccgtatatacgtatggggaatatatgcgtcgttttattcatgatgtgaagaaaaaaggtgcttatcctgttttgatgtctctgactcctcgtaacgcttgggaagatgcagacagcactattattacccgggtgaatcagacatttggattatgggcgaagcaggtagctaaaaaagcgagaattccttttattgatctgaatgatatctcggcacgcaaatttgagaaattcggcaaagaaaaagtaaagtatatgttctatctggaccgtattcacacaagtgcttttggcgcgcgtgtcaatgcagaatctgcagccgaaggaatccgtaattataaggggttggaactggcgcgttatttgaaaccggtagaaaaagatacggttacgggggctacccgtaaaaaggggaatcctgtattgtttacggtgggagacagtacagtgaagaatactgataaagatgaaaatggcatgtggggatggggaagtgttattcacgaactgtttgacacagaaagaatttctgtagagaatcatgcgaaagcgggccgcagtgcgcgtacttatttagatgaagggcgttgggataaaatctatcatgcacttcagccgggagattttgttttgatacaattcggacataatgatgcaggtgacataaacacagggaaagcgcgtgcggaattacccggttcaggaaatgaaagcaaggtcttcaaaatggagaaaaccggcagctatcaagtggtttattctttcggctggtatttgcgtaagtttattatggatgtaaaagaaaagggagctgttcctattgtcttgagtcatacaccccgcaataagtttgataatggtgagatagagcgcaatacaaattcttttggtaaatggacgcgtgaagcggcagaagcggccggggcttattttatagatttgaataaaatatcaggagacaagctccaagatatgggatacaatcaaggtttgcgtgtagtaggaacgtatttcaatcatgaccatacccatacctctttgaaaggtgcccgtatgaatgcccggagtattgctgacgggctgaaagctacggactgtccgttaaaagattttttaaagtaaatgaaaacaaagcaacatcgtatgaaaaatctgtttctgtttttatttttattagttgtctttacgtcaaaggcacaggataatagagtatccggtttgaactcccgccagtttactaaatactggaaggttgaatcggaatcgcctgattataaagtgacgtttcagggagataccgctgagatagtatctcccaagggattgactctttggagaaaagagaaaatgagtggaaaagtgaccattgaatatgatgcatgtgtggtggtggagtcggatggagatcgtctgagtgatttgaactgcttctggatggcatcagaccctcaatatcccgataatttatggaagcgagaaaaatggcgtagcggtatattcctgaattgttattctttacagctttactatttgggatatggtggtaatcataactctactacacgtttccgtcgttatgatggggatgagtcgggtattacaaatcctaaagcccgtcctgctattctaaaggaatatacggatgccggacatttgctgaagccgaatcattggtatcatatcaagattaccaacgagaacaatagggttagttattacatagacggtgagcgtttggtggacttcagggatgctgaaccgttacgggaaggctggtttggttttcgtaccactttgtcgcgtactcgtattacaaatttcagttatgaatgctcatcgcaagaagtggctactattcctttgcaatggattggtgaaactccccggcaggataaggccgtaagtttcggagtgccttttgataaaggggaagtttttccggaaaacaagctacggctatctgcagaaagtggtgaggatattcctattgatacttggactttggcttattggccggatggttctgtaaagtggggaggaatagcaggagttattcctgccggaacagaaaaattgactctggaaaaggcggtaaagaaatctaaggcgaaatccaaactgccggatacagataaaaaaaagtccgtttctgtggcagaaacatcacagggtattcatatctctaccggagtcatttcagcatatatacctcgtcaaggcgaatttttgatagatagtctgttgtataaaggtgtgaaagtaggagaaaaggctaggcttatatgccatacgcaaagcgaaccggtacttgaaagtacttctcaagtttcttttactaattatataggagaactgaaatctgtgactgtagagcgtgccggttctgtgcgtgcacttgttaaattggaaggggtacacaaaagtccgaatggtcgtgagtggttgccctttgtggtacggctttatttttatggtggcagtgagcaagtgaaaatggtgcatagctttgtatatgacggagatcagaacaaagattttattcgcgccttgggagttcgttttgatgttcctatgcgtgaggctttatacaatcgccatgtagctttctcttgtgccgatggtggagtctggagcgagcccgttcagcctttggtgggacgacgcatacttacattggataaaaccggaaatggagaatcttcgttacagcaacagcagatggaaggaaaacgcattccttcttatgaagcttttgacgaaaagaaccgtgctttgcttgatcattgggcttcttgggacagctatcgtctgtcccaactgacagcagatgcattttcaatccgtaaacgtgccaatgacaataatccttggataggtactttttccggtacacgtagtgagggttatgcttttgccggagatataaccggaggtatggggcttgagttgcatgatttctggcagtcttatccgtcttctattgaaatctcggatgcaaaaactccggtggctgctcttaccgcatggatatggagtccggatgctgagccgatggacttgcgccattatgataatgttgctcatgacttgaatgccagttacgaagatgtacaagaaggaatgagcaccccttacgggattgcccgtacaacgacttttaccttgatacctcagggtggttatagcgggaagaaagcttttgcagaacaagctaaacaatttgccggaccgggagtgctgatgcctgtacctgaatatttgcatgccaagcaggcatttggtgtttggagccttcccgatcgtagtactcctttccgtgcccgggtggaagacaggctggatgcttatatcagcttctatcaaaaagcgatagaacaaaacaaatggtatggcttttggaattatggggatgtgatgcatgcatacgatcctgtccgccatacctggcgttatgacatcggaggttttgcatgggataacacggaactggcttctaatatgtggctatggtataatttcctgcgtaccggacgtgctgatatctggcgcatggcggaagccatgacccgtcatacggcggaagtggatgtatatcatatcggtccgaatgcaggattgggtagccggcacaacgtcagtcattggggatgtggagctaaagaagcacggatcagtcaggctgcctggaatcgtttctactattatcttactacggacgaccgatgcggtgatttaatgaccgaggtaaaagatgccgatcagaaattgtacacgctggaccccatgcgtctggcacaacctcgcagtcagtatccttgtacggcacctgcacgtctccgcatcggtcccgactggttggcatacgccggaaactggatgactgaatgggagcgtaccggcaatacggcttatcgtgacaaaattatagccgggatgaaaagtattgtggcactgcccaaccgtatctttacaggtccgttggctttaggttatgatccggctacagggattattaccagcgaatgtgatcccaagttagaaagtacaaatcatttgatgactatcatgggaggttttgaagtcatgaatgaaatgatccgtatggttgattatcccgaatggaatgaggcatggcttgatcttgccgcccgttataagcagaaagcatgggagttaaggaagaatcgtttccgtatatcccgtttgttgggatatgcagcctatcatacccgtaatgcaaaaatggcggaagaggcttggacagatttgttttcccgcttggaacatactccggctccacctttccatatagaaactattcttccgccggaagttcccgctcctttggatgaatgtacaagtatcagtaccaatgatgccgccctttggagtctggatgccatttatatgcaggaagtgattccggtggatggtgaataaatgatgtgaagattatcgttaggtatggattacatggattccacaaggtgttttattctttttccttaattccgcaacactattacaaatataactttttaagtacctgagcaacaaaaagttgctcaggaatttgccatgtcagatttttcacctatcttagtgttgcaaatcaaaatatgtatcaaacccgacagacatggcaaaggtagcaattaaatccgagaaactcactccttttggaggaatattttcaataatggagcaatttgactccagactctcatctgtaatcgactcaaccctcggtatgagatgcaggctgtatggttatcaatacagcgaaatcatccgttcgcttatgagcgtttatttttgtggcggctcatgcatcgaggatgtcaccactcatctgatgtaccacctttcgcttcatccgacacttcgcacatgcagtgccgacacgattcttagagccataaaggaactgacccaggataacatttcctacacatccgacactggcaagacctacgacttcaacacggcagacaagctgaatacactgctcctcaattgcctattgtccacagggcagctgaaagagggcgaggggtatgacgttgacttcgaccaccagttcatagaggctgagaagtttgatgcgaagcctacatacaagaagttccttggttatcgccctggcgtggcggttattggcaacttgattgtcggcattgagaacagcgacggcaacacaaatgtccgtttccaccagaaggacacgctgaagaggttctttgaaaggtttgaacaaaacaagcttattatcaaccgtttcagagctgattgcggctcgtgttctgaagagatagtggaagagattgctaaacactgcaagaccttctatatccgtgctaaccgatgcagttcgctctacaatgacatctttgccctcagaggttggaagaaagtggaattgggcggcattgagtttgagctggcctccattctcatcgagaaatggaaagggaaggcataccgtcttgtgattcaaagacagaagcggatagacggcgaactcgacctgtgggaaggagaatacacctaccgctgcatccttacaaatgactacgagtcttccgagaaagagattgtcgaattctataacctccgtggagggaaggaacgcatcttcgatgatatgaataacggattcggctggaacaggcttccaaaatcctttatgggagaaaacacggtgtttcttctgcttatggcactcatacgcaacttctataaattcatcatggcgaggcttgacgtgaagaggttcggactcaaagcaacaagccgcatcaagacgtttgtctttaagttcatctctgtgccagccaaatgggtcaggacatcaaggaagtatgtgctgaatatctattcatgcaacaatgcttatgccaatgtgttccagaatgactttggataacaccgacaacttatagtcgtgattttgcgtattgcctcaagtcgcatggtggggtaaggggcatttatatgtctttatggtgacattcgatgcactgtgccccctttttactaacgatgcagattcttttcgcttctgtatcatattaggcgcgtagttgcggatttgaggtttttgtggaattcgtgtaaaatcagtaacagacaaaaatgggttcacttgaagaaatttattggaacatgataaaaaagcaatggaaagttggagcacattatgctctcatgccctcataatgatggtaattgtctcattaacaatgcactatatatgagtgcatcatctttatgctctcataatatgccatcatgctctcacatcatattcatgtgttcttagttatatcttattgtttgtcagaaagataaattatttatagttgtatcggtaacttatttctgcaatacgcttttggtcctttttgggggctaatggtgcataataaagactcttttcatttgctgctttccacatatcttctttctgcattatccttgcaatatatcgtttacatacagacgtttatcaatattcaaccgtttgtatttacttaatcacataggtggttaagtctaatcacgatagtgactaagtctaatcatataggtgattaaagttaatcacaatagtggttaagtaattttgctagtttagttgagcaatcatgaaggaactttgatgtaagcctgttcctatttttacgtaactacatctctatatttgtatcgtataatcggaagatatgtttttgctatcggtataaatcatctgataataagtaatatacgtctgtgtgagaaagtaaacacagtgagggcatgagggcatttatgagagcataaagatgatgcactcatatatagtgcattgttaatgagatgattatcatcgttaatgagggcatgagagcatattgtcttccaactttttttgtaaacttgctgaaggaataagaaatatgtttctttgaaatctatatagttagaaaaattgccgtattcttaggttatagatgtctttagatggatagggtaatattttatcgcacctattttgtatttttgtaaaaaggagcgttttgtatgaagaacataatcagaaagataagaacttaccatcctgtttcggggtgaagcgttgggaacattgacacaacttttggagaggcatatattcccggcagaaacacttcttatcatcatatcagttatgaagtgatagggtacaaggatataataggatgtacgggttcctatttaggggcaaaaaagaatagaagtaagggtaagtagtcttttaattctttccgtaattgttttagtgcctgttgaattctgtaatctactgttttggaagatatgtttaattcttctgcaatttcctgataggtcttattttggaaacggtgcatttcaaaagctatccgataggattctggaagattaagaattgctttttctattttttgtgttaattcatctataatataaaaatcaggatcttcgaatagttcctgtatgtctggagtgagtatattttctatttggaatcgaagagaatttctggtcattaaggtataacatttgttttttactgctttgaacaaataatgatgaacagaagaatctatatgatttgtttttctattctcccatatctgtaacatggtatcttgaaccacttcttctgcatcttctaatgaaacaaaactgcgggcaaaagcacaaagcatagcataatatttgatgaataaagtatcaaacgctttcttattgccctgttgcatggatatatacagttgcttgtctatcaaattatcatttgtggtttccatagattatagaagaaaatgttactgcaaaaatacataaatttaaatatgaaaacgcttaatcgaaaaataattcaaaaaaaacagtttttggtttaggaactttggatcttggttagacttattataaaaggacattatgataaattcagatacccaaatagatgaagcgcttttactccgttattttgaaggagaagtgactctaagtgagaaagaagagattgaaaaatggattatctcttccgaagcaaataaaaagctggccaagcagatttattatctttcttttgccacaaaaacaatggataccttaaaacggactgatgcacgggctgctttgaaggaagtcagaggcaggataagaagggaacgacagctacaatgggggcgatgggcacagcgtgccgctgctattcttgccatacctttgctactgtctactttgtatttatggatgaatggtaatgagcagaataaagtgaattttatagagattcgtactaatccgggaatgataacttctactattttgccggatggaactcatgtaattcttaattccaattcaactattgtttacccttctcactttgacgaaaaaagtcgtaatgtccaattgaatggcgaagcctactttgaggtaacaaagaattcccgtcagccttttatggtccgaacgccgcagaaagctgttgtaaaagtttatggtacccaatttaatgtggaagcctatgctgatgataaaacaataactgcaactttggtggaaggaagcattgccatggcgtatgaaaataagaaaagtaattggacggaacaggaaattcagccgggacaggaaattgtttatactgctgcacagcaacaaataaaaattgatcaggcagatgtagaggttatcacttcttggaaagacggaaaacttatttttcgtgatactccatttaaggaagttcttaaaatgctatctaaacgttttgatgtggatttcgtagtaaagaatcccaaatgttttgaagcctcttttaccggtgtacttgagaaacaacgcttgggacgaattctggaatatatcagcgtatcttcaaatataaaatttaagtatgcagaaagtaataatattcatcaagaaaaacagaaaatagaagtttattaatcttttaaaaataacaagctatgttgaaacatcctatgtaaaacaatctacagaaaaaacacactactttttatctgtaatcaaattatgaagttaaaattaaatctatttacgaaaatgaagaaaccagtatgtaaactgcctttgtcgctgaaaataactatttttgttcttttcagttttgccagcttgttatatgctagcaataattatgcacagagaaccatgttgaacatcagttctcagactcggacggtctctgaagtcctgaccgaaattgaaaaacagacggatttcacctttttctataataataagcaggtcgatttgaaacgtaaagtaaccttgaatgtcaaaaatgagaatgttttttcagtcttaaagaagcttttctccggaacaaatacgacctataaagtcttggataagaatattattctttctgaaaagtctgccatttcttccgcaacgaaagaggtagccatcgtacaacaggtaggtcgtagcgtaaagggcgtggtggttgatgataaaggagagcctgtaataggtgctacggtgatggtcaaaggttctactaatggaactattacggattttgatggaaattttatattgaatgatgtctcaagtaatgcttctttgattgtcagttatgtggggtatgtaactgaaacaataagtgtaaatggaaaatcttctttcaaaattgtgatgaaagaggatgctaaaacccttgaagaagtggttgttataggatatggagtagtgaaaaaacgtgatttgaccggttcttctgtttcagttaccggtgcagatttagcggaagttcctgttactaatgcggctcaagcgctagcaggaaaagctgctggagtgaatattgtttcacagaacggagctcctggggctgaagtgaatattaccgttcgtggaggtacttccattactcagtctactacacctatctatattattgatggcttccagtcggaagatggtttgaagaatattgatgtaaatgacattaagactattgatattttaaaagatgcttcgacaacagctatttatggagcgcgtggatcaaatggtgtggttcttattacgaccaaaagtggaagtagtggcaagacaactgtgaattacaatggctatgtatctgtggattggttgggcaagaaactggatttgctcaatcttgaacagtatgccaaatatcagtatgaatggtggactcttgccggagaaatgaaccagtatgcacgtatgtttggaggggattatacggatgatggattttatacgggagcatggtctgatatagagcaaacttatggcggacgttccggaatagactggcaagataagatttttggtggaagtgctcttactcaaagccataatctatctctttctaccggaacggaaaaaactcaagtattggtaagctacaataatatgtcgcaagacggtatcgtaaaaaatcacggatattaccgtaatacgattcgtactaaagtaaattcccagctatggaaaaatgtacgttttgatatgaattcttcttttaattacgccaaaacattaggtggaggttcttattccggattaaaacaagctattttgcgtcctgaaactggcggaatcctgtttactgatgatcagcttattaatgaagagttaaataccgaattccgtactttcagtaacgaatatgatgtgtataacccattgataaccaacgatgctataataaatagaaaacttagtcgtatttttagtgttaatgccggtgtggacattgatttcttgaaggattttacattccgtacagctggtagttataattgggcccaaatcaaaacaactaatttcgatgatggtcgtacggccaatgctcaactcaaaggcggaccttatggcagtattgataataaggaacgatatgcttatcaatggactaatacattgaattggaaacatacgtttgagaagcatgatttgggcgttttgttaggacacgaattatattatacaaatacatctggtacagaaactgcctataaggcatttcccgatactaatttcggtcttaatgatattagtatggccactcccgatacatggaagtcttctttagaagaaaatgctttgttgtcttttttcggtcgtctcaattatacttttaatgaccgctatctttttacagcaaccttacgtgcagacggttcttctaaatttgccgagggtaatcgttggggctatttcccttcagcagcggcagcttggcgcgtttctgaagaaggattctggaaagataatgctatcggaaatgttgtcaataatttcaaattgagagtaggttatggaactaccggtaattgtaatattgataattatatgtatgctactgcctataatgctacggtatatcctgtgggcaatcaggaaacggcggctttggcacctggcagcacagtaggtaataataacttaaaatgggagaaaaccgtttctacgaatatcggactggacttgggtttgtggggaaacagagttaacctgacattggactggtataacaataagagcgatgatttgcttatgaaagtggctatcccgacatcaaccggttatacgcaccaatatcagaatatcggttctatccgtaatcgcggtcttgagatagctataagcagtacgaacatccgcaacaaacattttacttggactaccgatttcaatatctccttcaatcgttccaaggtcttgagaatagacggtgagaatgaatattatcagactagcgtcagtggtggtaccaattcttctgttctataccgtgccatcgtaggtcattctttaggtgagatgtatgggtataagaccaatggagtttatactaccgacgattttgtgcagaatggtgataaatatgttttgaaagatggtgttatttatcagaaaggatctgtaaaaactcaatataaaccgggtgatatcaagtatgtaaatactacggggcagacggatgacaaggggacacctgtttataattctgatgatatgacagtcatcgggaatgctaatccggattttaccggaggttttaaaaatactttttcttataagggctttgatctttctgtatttatggtattctcttatggtaatgatatttttaatatgtctacccagcgttttgtcggtccataccaaccgtaccaaaatatgcttgcggatgctgccaatcgtttcactctgctggatccccgtactggaaaagaagctacggacctcaaccgtatagctgagcttaatcctaatcagcatgatccgaacattctgtggagtattcataatgacaaccgcgcagctattactactccgcttgatcgttttgtggaagatggttcttatcttcgcataagcactattactttaggttatactttcccgaaaaagtggttaagtaaagcttttatcagtaatttgcgtctatattgtacattgaataatccattcactattacgaattattcaggttatgatcccgaagtttctaaggaaagttctattttaactccgggtattgatgattcttcttatccacgttccaaaggatttgtatttggcattaatctttcattataataataggagagttgtattatgaagaaaatagtatattatatagctgttgcctttttggcgatcaatttcagttcttgttctgactttctggatcttccttctaaatcgaagacagacagtgaaagtgttttctcttccattgataaagctgagatggctgttcttgcttgttacacaggtgtctggatgcaggatgcttggtataaggctcagaatggaacagatgaaatgtggtctactgagagtaattcgaatgctaataattatgcggccaattatgtgctcaatgatcaaagttgtcccacaggcatttatactacctcttattccagcattgagcgttgtaattcatgcttgaaaggattacgtgcaatgagcctttcgggagaggacgagagaaagtgtcacatttatatagctgaatgtctggctgttcgggctacttgctttctgaatttgattcgttattttggggatgtaccttattctactgttcctgtattggatatgacgactttttcttcttcccgtgttgatcgggatgagatttatgatggcattattgccgatttgcaagaagctgtcgaagtacttccttggtatagtgaaggatttttctctactcctgagcggatttccaagaatgctgcttatggattattggcccgtacagctctttatgcagcaggttatgctttgcattgggatctgaatacttatgataaatctactcttcagatgcgccgtcctttggatgaatcgcgtgtaagaaaattatataccattgctgatgaagcttgtaaagcagtgattagtaaaggtgaaaacagtttgctttctaaatatgaggatgtgtttagagccttgaacgagggtggcgtttataaccctgaagaggtaatgtttgaatatgctgagtttggcaatacaaccaatggtcgtgtgggatatacaaatggactttgcattcatgcttccaatgccctttatggtaaaacattgcctttgcaactgattcatcctaccttttatctttcttttgccgatgatgatacccgtcgggatgttacagtgggcaattacagtattgatgcggctggtaacgatattgctgtgccttatggcgctttgaatttgggaaaatggcgctgcaattggaaagccggtccccgtacggccactttgaaaacggatgtcaattggcctatacttcgttattcggatgtattgttaatgtacgcagaagctgaaaattacttgaacaatgggcccacggaagcagctaaggcagcttatgaacaagttcgtctgcgtgcttttgcaggagatgcctctcgtataggtaccacaccctctacttatgatactttttttaaagcgattgtgaaggaacgtgcctttgaattagctacagaaggatggcggcgtactgatcttatccggtggaacttgttggctgaaactttggctgaaacaaaagcaaataccgagaaactggctatgcgtgaggttccttataatgaggtgaagacttatcgggcatataaagaagcaacttctacatcttggaaggatcctttggtaggtcttacttatatagatttcgatcatcagcccacagaaacggaaatgagtgaactggttgcccggtatggaggcacttggaattgggtaaatatgtttattactcccaatattgcaggagaaactaattccggtatagccggacaatccaagatattgggttataaagaaaacaataacacgttgcccgcctggattaccgagttatatcgtgggtttatcaagaatcaggctgaactttatactttgagcaccacagccattattgatgttaatcctgggttaaccggtcaacaacatcctgcttattaatcaataaattataaacatttctatataggaagggggaagaatagtgatgattttttgtttcttttctcttcctatcttataaaaaaaacagtatgaaaatgatatgtatggcggtaatgcttttcattactttgttgtctgctggagcacagaaaaacattccggcctctgatataaaagtggctatgatgaaagctacacgtttcatggtagagaaggtcagcaaccgtggtggctatttatggaattacagtcctgatttctcccgttgttggggggaactggaagctaaaccaagtatgatatggatagaagctggtacacctgctatgggaaatgtatttttgaatgcttatcaattgactggagaatcttattacctgaaagcggcacaagcagcggcagatgctcttatctggggacagcattcaagtgggggatggccttatatgttggacttttccggagaaacttcgcttaagcaatggtattccaaagtacagaaaggatatattcattgtgctcaggaacatgctcattattatggaaattgtacttatgatgatgcggctacctacgatagtggaatgttccttttgcgtatgtatttactgactctggatccgaagtataaatatccggtagaaaggtgtcttgattttgttttggagagtcagtatcctattggtgggtggccgcagcgctatcctctccattatgaatatgtgaaaggtgataaggaagactatacttcgtttattaccattaatgatggagttcatactaacaatattaattttttattggcttgttacactttattaggtgaaactcgggcattggagcctcttcagcgggctatgacttgtgtcttggctttgcagggaggaaagcctcaggcaggttgggctatgcagcataagttggatctcaattactctccaggtcatgcccgtgattttgaaccggcaggttatgcggctacagctactgccgagatgtgtcgcaacttgatgcgtttttatcgttggactggggatactaaatatttagcccgtattccggatgcatttgaatttctagaatctatccgatataacgacgcgcaaatgaaacaattgggtaagtctgtaaaaccgggacagatattgtgtcctacttttgtagaagtaggcactaacagacctctttaccttcataatgatccagatcattattgggtggattatgattatcatggactcataactcattatagctctacgcgggctattgatttgcaatctttaaaagatgagtatcagcatttgctctctctctccaaagaggaagtgacaaaagattctccgtttataggtcaaacggatatttctggaactttactaagtcatttaatgcgtggtaaaatgcagcaagcggatacacaaaaagtagatagtctgctcactattttgaagaaaaaagattatttacccggtcgtttgcctagtgtttcgaaagagaatccgggcttctctaatgctcctcttccttctgaagtcatttccatcaaggaatatatgaatggtatgtctacatttattcagtatcttactaaatagtgtctatgatgagaaataaaacattttttattgttgtattggcagcaatgctgctggttacagcttgtgccgatactgctattgaccgtcatgcattggtgatgcgtaataaccctcatgttacaaaaattgattctcttcattctttgacagtcggaaatgggcggttcgcttttactgccgatgctacgggattgcagacttttcccgaatattataaagaaggcttgtctttaggtacctatagcgaatggggatggcacagttttcctaacaaggaggactataagatagttgaaactctacaggatcatccgcttcccggtcatcctcatgggatttatgccgtacaatttccggaaggtcctgaacgtaatgccaaagcggcagagtggtttcgtgccaatccgcaccgcctgcatttgggaaatataggatttgacagcttgttggtgagcgatattactaaaatagaccagactctcgacatgtggaaaggagaacttcattcccatttcctatggagaaaacttccggttacggtaactacttcttgtaatggcgatagtgacattgtctctgcttctgtgtcttcatcggcaaagctggcagttggcatccgttttccttatcctacaggtgaggcagctgacgatgctacttgctggacagccgatgactgccactctaccgacattattctttccgaacctcaacgggctcttattcgtcgtactgtagattctactgtctattatgtggaaatcagttggagtggtaaagctgttctttctcaaacagggaagaacaggttaaaattgacaccttccgataagcagtggaatttcaatgttgggttctataagcaccaacctgtagtgcctcagcctgattacaaggctaatctgctttcggccaaccgttgttggagggattattggcagacatccggtgttattgatttttcttcctgtacggatccccgtgcttcgcttttggagcgtcgggttgtgctgtctcaatatttgctccgttcgcaggaagcgcaaaattaccctcctgctgaaaccggcctgacttataatacatggtatggtaaatttcatttagaaatggtaatgtggcacagttttcattatgcgctttggaataaagcagatcttttggagaaacaattgaaatggtataagactgccgtaccgatggcatgtgatattgcagccagacagggatttaatggcatacgttggatgaaaatgactgatccatcttctaaagaggcaccatcggatgtcggctcttttattatctggcaacaaccccatgtcatttatatgtcagaacttatctatcgtgcacgtccttctcaagaatttcttcgtgagtatgctgatatggtagagcagacggctgcttttatggcttcgtttgttaattatgattctgataatgatcgttacattattcagggagcttgtgcggctaatgaatcctataatgaagagacgacccttaatcctgcttttgaaatggcttattggcattttggcttgtccatagctcagaaatggcgggagagacttgggctgcaacgtcatgcggagtgggatgaaattcttgctaaattagctcctcttgctactagtcctgatggcatttacttaccggcggaaaagggtagaggaatacctgatttcgtgaatggtattcctgctgaaaaattaccggaaatgccggccggtggatacattaatggccagcgtcctaaagaagcagacggttctgtttctctatcggaaggtgagaaaagcaaacgtaagcatgatcctttttatgttacaggaacttcttctgaaaatttgctggcttacggcatgttgcctgagtcgcggctcattgatcaagaaaaaatgcaaaagactttggtgcgtgcagctcaaaattggaattggtccggaggatcttggagttggaattatcccacattggcaatgaatgctactcgcctgttgcagcctgagattgctttgcgtgccataactatggacaaccgggaggacttgcttttacctagtggtaataattatcgttcgactcgtcttcgttcttatttgcctggtaatggagggctgttattagctgtttctatgatgtgtgccgggtgggacggttgctcggtcagtaatccgggatttcccaaagatggtaaatggaatgtgcgttgggagggattacatcctatgccataggatataaggaagtcgtaaaaatgaatatctatttacagtgtataaaaatttaggtaatgaaaatattgttattttgctctttattagtgatgttcggtgcctgtactcatcccgtacagcagatttcaatagaccgtaaggcgttagtgaatcggaataatcctcaattttcagctttcgattcgttggcttcgctttcagtagggaatggcgaatttgcatttacagtagatattacaggattgcaaacttttcctgacgcttataaaaaaggtgtccctctaggtacgcaaagtcaatggggatggcatagttttgctaatatggacggttatagacacgaagaaacattgagtgaatatgattttggacgaggacataaggaattgtatgcagttcaatctcaagaagataaaagacaaaagaatgcatctgattggtttcgtgccaacccacatcggttacatttaggagtgatcggatttgaatggggggatgaggctgctatttccgatattaccagaatcagtcagactttgaatttatgggaaggtgagatactcagtcggtttacttggaaagggaatgaatttaatgtacggacggtttgccatccggcacaagatatgatttcagcccatatagacagtcacttgcatacagggataaaatttcattttccttatcctacaggtattcatactgataatgcatgtgattgggatgccaatgataaacactctaccgaggttcttaaacaggacacacaaagcgctgtgttaaagcgtacgttggattccacggtatattatgtagaattaaaatgggaaggcaaggcattattgaaagaaaaagagaaaaattatttcgtactgcttccacaagaagatgctttttcgttttcatgtgcttttaccgctaatgagccagatcagcttactgtactccctgatttttttgaagttgaaagtttggctaagaatcattgggtgaacttttgggaagaaggtgctgcggtagatttctctcattgcacggatccgcgtgctaaagaattggaacgtcgggtagtgcttagtcaatatttgcttgctattcaatgcgcgggtagtacccctccgcaggaaacagggctaacttacaattcgtggtttgggaaatatcatcttgaaatgatttggtggcatcaggcatggcaaccgctttggggacattctgaattactcagccatactttagaatggtataaaacggtagagcctatagcaagggaagtggctcgtcggcaaggctttgatggaatccgatggatgaaaatgactgatcctagtggtgtggaggcaccttccagtgtaggcagttttttgatttggcaacaaccgcattttatttatctggcagaacttctttatcgctctaaccctgataagaaagtgatagagaaatataactatctggttcaagaaacagctaagtttatgtatgcttttgccacatatgatgaattgggagtgcggtttattttaaagggagcgattccagctcaagaaacattgaatgcgagtactactataaatcctccttttgaactttcttattggtattttgccatgcagatagcgcagatatggcgtgagcgtgcaggtgaaaaacgtaacttggaatgggatgagttaatagacaaactttctccgctggcttataatgaggatgggttgtatctggctgcggaaaatgcaatagacacttataaggatattcgttttaccagtgaccacatggcagtgttgggtgccgtaggtatcttgcctatgaataaattaatccgtgaagattacatgaagaatacacttcaatggatatgggataattggaattggggaaagacttggggctgggattatcctatgacagcaatgaatgctactcgattgggtgagccggaaaaagcggtggaggcattgcttatgaataaacgtaccaatacatatttgccgaatggacataattatcaagatccccgtttacgtgtttatttacctggtaatggtggtttattaactgccattgcattaatgtgcgctggttgggatggttgtgaaatagaaaatcctggtttcccgaaaaatggaaaatggaatgtaatgtgggagggattgtcgcccatgccttaaattgatttgataaagtggcgtactattgtttatgtgctgatgtatcaataggctgtgtaatgtttcgcatagctattggtatattggcacattggtttattgttgtaaatgtggtaattgtttattgaggctttttgtattctgcaacataaaaaacaccataaatacgataaataatacaggctttatggacgaatttccatattattgtatcttattctatggaatctaattccatttcgtcttatttttgcaatattgaaaataaaaactatgaaatacaaaaaactcatttcttttctagctttctttttagcagttttgtcagtatatggacagaacccttttgtcttgaaatcaggtgaaccggtgactattgcttgtggtaattcagaggaagaagttgtacatacagctttgaatttgctcaatcgtgatgtagagtctgttttttctacccgcataatcgttactccagaaagtaaaaaaggaatgattatagtcggaactatcggacaaagtgatttgatcgctaaagcaggtgttgatttatctcctataaaaaataaaaaagaagcttttctgttgaccgtttcttccactggtaaattagttatagccggcagtgacaagcgtggtactgcatacggcgtcatggaactttcacggttgataggcgtttctccatgggagtggtgggcagatgcgacccctgcaaagaaagagatttttcaactaccggtttcttatcggaatatgcagtctccttccgtagaatatcgggggatttttatcaacgatgaggactgggggctgactccttggagctggcagacatacgagccgagcaatgtgaaaggacaaataggcccgaaaacgcatgaacgtatctttgaattgatgcttcgtctgcgtgctaataccttctggccggctatgcatggttgttctgtacctttttattttacaccgggcaataaagaagtggctgataagtttggtattttcataggtacttctcattgtgaaccgatgatgcggaataccaatggtgagtggaaacgggatggagtgggagagtatgactatgttcataacagtgctcatgttttatccttttgggaacaacgcgtaaaggaggttgcagagttggataatctgtatactttaggcatgcgtggagtacacgacggtgcgatgaatggtgctaagactatagaagaacaaaaagccgttctgactaaagtgctaaaggatcagcgcgatttgttgactaaatatgtcaataaggatgtgactcaagtgcctcaagtctttattccttataaggaagttttggatgtgtaccatgctgggctgcaagtgcccgatgaagtgacgctgatgtggtgcgatgacaattatggttatatccgtcatttccctacagcagaagagcgtgcccgtaagggaggaaacggggtatattatcatatatcttattggggacgtccgcatgattatctttggttaggaactgctcatccttcgctggtatatcaacaaatgactttggcatatgagcgagggatacagaaaatgtggatattgaatgtaggggatattaaaccgtctgaatatcagatagagcttttccttgatatggcatggaacttggaagcggtgaagcagcaaggggttgtagctcatcaacgtcagtttctagagcgtgagtttggactggaagtggctgcacaattacaacctgtcatgcaggaagcttatcgtttggcttatatccgtaaaccggaatttatggggaatactcgtacggaagaaaaagatcctaagtttaaaattatcagtgatttgccttggagtgaacaagaaataaaagaacgtctgactgcatacaaacaattatcagataaagtggagcaggaatggcatacgctttctgcacaaaaaaaagaaacctatttccagttggcgaagtatcctgttcaggcagcggctcaaatgaatagcaaactgttgaccgcgcagttggcacgtcgtggaaaggttgattgggcggatagcgacagggcgtatgatagtattgtttcattgacaaaacgctataacacgaccaaatggaatcgtatgatggatttccaaccacgcaaacttccggtttttgaccgggtggaaagaaaaacagttttatccgttttacctgaaaaacgtcaggctgtctatacatggaatggtgctgattgcgttaatagttcaccggtagtatgcgaggggctaggttatgaaggaaaggcggtagcggtggcaaaaaataaagaacttacttttgagtttgctgcgtgggaaacggattctgtagaggtggaggtacgattattgcctaatcatccggtggaaggagaacggttacgttttaccatttctttggatggaagtgccacggagtctgtttcgtatgaaaccaaaggacgcagtgaggaatggaaggaaaatgttttgtgtaatcaggctgttcgccggatgattcttcctgttacacggaaaacctctcatcgtttaatttttactgcattggatgaaggtgtggtattggatcagatatacctttatacacctcggataaaatagggtgaacgaagatattcaggatatttgtgcatacagaaattacaatgaaaaacaacagataaaatgaagaagactttttttaaatctttggctggtattgcggccatagcttttgccgtatcatgtacagtaccggctccaaagtataaaatggtaatagttgatgctccttttgctatggaacccatcaaagaatgtgtttttcccgaacaagatttttccattgtggattatggtgcggtgaaaggtggggaaacagtgaatacggaggccatcgccaaagccatagcagcttgtaataaggccggaggaggccgtgtggttattcctgaaggggaatggttgacaggacctattcattttcaaagtaatgtaaatcttcatttggaagaaaatgccatattacgctttacagataatccttctgattatctgcctgctgtgatgacttcatgggagggtatggaatgttacaactattctccgttgctgtatgctatggattgtgagaatattgctattaccggaaaaggaacattggctcctattatggatacttggaaaatctggttcaagcgtcctaaacctcacatggatgctttgaaagagttatatacgatggcttctaccgatgtacctgtagaacagcgtcagatggcaaaaggagaaaatcatcttcgtcctcatttgatacatttcaaccggtgtaaaaatgtgctgctggatgaattcaagattcgccagagtcctttttggactatacatctttatatgtgtgatggtggtatcgtacgtaatctggatgtaaaggctcatggtcataacaatgatggaattgatttggaaatgagctgcaacttcttgatagagaactgtgtgttcgatcaaggggatgatgctgtggttataaaggcagggcgtaatcaggatgcatggcgtctgaatactccttgtgagaatattgtgatacgccattgtgatattttgaaaggacatactttactgggaatcggtagtgaaatgtctggtggtgtacggaatgtgtacatgcacaattgtacggctcccgattctgtattccgtcttttctttgctaaaaccaatcatcgccgtggcggatttattgaaaatatctggatgaaaaatgtgaaagcgggaaagatgcaacgtgtactcgaagtggatacggatgtgctttaccagtggcgtgatttggtacctacctatcaggatagcattacattcatcaacggactttatatggatagtgtgacttgcgaccgtaccgaggctgtttatgatttgaaaggcgatgcccgtcttcctatcaagaatgtggaaataaggaatgtgactgtgggtgaagttacaaagtttgtgaagaatgtggtaaatgcggagaatgtggtggaggaaaatataatttacaaggagaaacaagataaacaatgaaaacacaaaaaaaactatggagtgctttagctgctctgtgtgtggcaactgtaacggttgcccaaccggcctacaattattctaaactgcaaaaagaacagttggggcgtggcgttgtggccattcgtgaaaatccatcggaggtagtggtgtcgtggcgttacctgtcttccgatccgatcaatacttctttcaatgtatatagaaatggagagaaaatagcggaagtccccaattctacaggtactttttatcgagatacttacttgggtaatgaaaaagcggtatatactgtaaaaccgatgataaatggggttgaaacaggtaagttgaatggaaattatactttgccggctaatgctccgtctggttatatcgatattcctctggacaggccggcagaaggtgtgactccttcaggacaaaaatatacctatagtcctaatgacgcatctataggtgatgtggacggcgacggtgaatatgagattattttaaagtgggatccttccaatgcacatgacaatgctcatgacggttataccggaaatgtttattttgattgctatcgtcttacaggagaaaaattgtggcgcattgacttagggcataatgtccgtgccggagcacactatactcagtttatggtgtttgatttggatggagatggtaaggcggaagtagtcatgaagacttctgatggaacaaaggatggaaaaggaaagataataggtgatgccaaggctgattaccgtgaaccgggtatcacagacggaaattcccatggaaatacacctcgtaaccaaggacgtatcctgactggtaacgaatacttgactgtattcaacggactgacaggagaagcgatgaaaacaattgattatgttccggctcgtggtaaattgaccgactggggagacaaccgtgccaaccgcagtgaccgtttccttgcttgtgtagcttatctggatggagtacatcccagtgtggtgatgtgtcgtggatattatacccgcgctgtgctggcggcattcgactgggatggcaagaacttgaaacaacattgggtgttcgacagcaataatccggggtgtggagactatgccgggcagggtaaccataatcttcgcgtaggcgatgtggatggtgacggatgtgatgaaataatttatggttcttgtgctattgatcatgatggaaaaggattgtattctacccgtatggggcatggagacgctatgcatctaacacaatttgctcccggattaaaaggtttgcaggtttgggattgtcatgaaaataagaaagatggttccactttccgtaatgcggctacgggtgaagtgttgtttcaggtgaaaagtagtatagatgtaggtcggtgtatggctgctgatgttgatccgcgcaatccgggagtggagatgtggtcatccgattcaaaaggagtacgtaatataaaaggtgaagtgattcgttctgacctcaagaacttttcagtcaatatggctgtatggtgggatggagatttgcttcgtgagttgctggataaaaacaggataaccaagtatgattgggaagacgatgtatgtcgtccgttaatgatatttgatggaacggattcaaataatggtacgaagtccaatccttgtttgcagggagatataataggtgattggcgtgaggaggtgctgctccgtacggaagataattcggcacttcgtctgtatgtgtcgcggataccgactgaataccgttttcatactttcttggaagatccggtgtatcgtatcagtatcgctactcaaaatgtggcatacaaccagcctacccagcctggtttttatttcggaccggatttgaaagaggggatatttagaggttatgaatttaaaaataaataaagactatataccatgaatctgaaaacattaagtatgatgggcgctctgttgctgctggcaggaacgggtgcgaatgcgcaaaagaagaaagaagtactgaatgattcgaatacgccgttacacttgttgcaacctgcatacaaagtgccttacggtatgctcactacagaggagataaaggccgatatggatcgtgtccttcgttatttggaaaagaatactccgactcgtgtcgttgataagaatacaggtaaggttattacggattatgccaatatgacggctgatgcacagctggaacgaggtgctttccgtctggcaagttatgaatggggggtgacttattcagctatgttggctgctgctgaggctacaggggatcaagcttattataaatatgtaacagatcgttttcagtttctggccgaggttgctccacacttccgtaaagtattggaaaagtatggaactgtagatccgcagatgaaacaaattttgactcctcatgcattggatgatgccggggcggtttgcgcggctatggtcaaggtgcagatgaagaaaaattcaccggaacttaagccgttgattgataattatatggattttattgtgaataaggagtatcgtcttgctgatggaacatttgcccgtacccgtccacaacataatacgttatggttggacgatatgtttatgggtattccaccgatagcttggtattcgtgtatcgcaggtgataaacaacaggcctatttgagcgaagctgtacgtcagatatttcaatttgcagaccgtatgtgggttcccgagaagaaacttttccgtcatggatgggtggaaggtatgcaggatcatcctgctttccattggggacgtgccaatggttgggcgttgttgactatgtgtgaggtattggatgtgttgccggaggattatcctcagcgcgataaaattctagatctgttccgtactcatgtacgtggtcttgctgcatgtcaaagtggtgaaggtttctggcatcagttgctggatcgtaatgattcttatctggaaacttcagccacggctatttatgtatattgctttgctcatgctatcaataaaggatggattgacgctatggcatacggaccggtggcacagttgggatggcatgccgtaacgactcaaatcaatgcggaaggtcaagtagacggaacttgtgtaggaacaggtatggcttttgatccggctttttattattatcgtccggtcaatgtatatgctgcccacggttatggcccggtactttgggcgggtgctgagatgattaatatgctgaacaaacaacatcctaaaatgaatgacagcgccgtgcagtattaccgtacggaacaaaagacttcagaacctattttccatgtaatggatggtggagctaaataagaaaaaaacagaacttaaaaaaaggaggaaaataccatgaaacgtgaagcttttaagatgttcttgaaaccgggctttgagaaagagtacgaaaaaagacatgcggctatttggccggaattgaagaaaatgttatctgatggaggagtatatgattactccatttattgggataaggatactaatattctgtttgcctgtcagaagacaaaaggagatgagtcttcgcaagatatgggggccaatcccattgtacaaaaatggtgggattatatggcggatatcatggaagtaaatccggataattctccggtaaccatcccgctgcctgaagtcttccacatggactaagataaaaaagagtgtatcgattcattttgatacactctttttttatacctttgcaggcacaacaacactatgatgaatgatatgaaaaaacacatctatactttatgggcattctttattcttttcagtcagagtattgccgcatcagtcgaggtgcgttctactcatatgactacgggagatggagtcgccaataactcaattcgatatatatatcaggatagcaaaggctttatctggatgggaacgttgaatgggcttagtcgttatgacgggaattcgtttgtgacttttcgtcctgagggtggaaataaaatttcgttgatagaccatcggattcgcgatttggaagaagataaaaatggtttcttgtggattgcgacttctgccgagttgtttagttgttatgatctgaagaaagattgctttgttgattttaccggttgtggggaatataaacaactgtatagctataagatgactgaccgtgaaggtaatgtctggttatggcaggatggaaacgggtgtcgtaaagtgacttatatgaatggtgggtttacatctatagttttcaagaaagaaaataataatctcccttctaataatgttacttatatatctgaggatgaacaaggaagaatatggattggtagccatgacggtatagctcaagtggtagaggacaaggcagtattggtggaagaaaatcatgatgcttccaagatgatgtcttttggtaaagatgttttttttctttcgggaacaggaacaatttcgttgaagagagaaggagaggatagccgtattgttactcgtttaggtgaaggtagtaaagtatatagtaccatgcgcttgcaaaacgattggattgtttttacggaagatggcagttatgtcttcaatttgaaaactcatcaggtaagtttggatacggaactgaatataaaaaaaggacaagttcagattgacaaccgggggaatttttggatttataatcatacgggtaaggtatggtatgtcaatgccaagaccagatttgtcaagtctttccaactgattccggctgataaagtaaattatatagatgaggaacgttaccacatagttcatgattctcgtgatatagtttggatttccacttatggtaacggtttgtttgcttatgatttggcaactgatgaattgcagcatttcgaatccaatattaatggattcagtcatatcacttcaaattttttgcaatatattatggaggatcgtgccggtggtatttgggttagttcggaatatacgggtatttctcgtctttcggtcttgaatgaaggagctgagcgtatttttcctgaagatgaaactttatcagaccgttcaaataccgtgcgtatgatcaaccgtatgcctgatgataagatttggttgggtacccgtcgtggaggattgtatatttatgaccctcatttgaaaactatagagagcagtcgttattttgattctaatatttatgctgttgaggaaggggctgatggtagtatttggttggggagccgtggaaacggattgagtattgacggaagatggtacacttatcactcggatgatcctctgtctattggaaataataatatctttactctttaccgggaccgaaagaatagaatgtggataggcacttttggcggtggattgaatttggcggttaaggaaaaggataggtatgtattcaagcggtttttgaacaatttttatagccagcgtcagattcgtgtgatacaggaagacaataatggatggatatgggtgggtactagtgctggggtttacatatttaatcctgattcgttaatgaatgatccggataactatattacttataattataataacggtaagttacgtagtaatgaaataaagtgtatccatcaagatagtaagggtcggatatgggttggtacttcaggaaaaggattcagtatgtgcatgccagaaggtgattacagaaacttgacttttgagcattatgatggaagtgatgggttggtaaatagtatggtgcaatctattgttgaagacagggagggcaaactttgggttgcgacggaatatggtatttctcgttttgatccggatacgcatgcttttgaaaatttctttttttcagcatatgcgttggggaatgtttatagtgagaacagtggttgtgtgagtaaggatggtaaactgatgtttggttctaattatggattagttgttatcactcccggcaaaattgtgaataattctactgtaactcctatggcagcttttaccaatcttcgaattaatggtattgctatgcgcccaggcgatgtggattctccgttagaccgttcgttgatttatacagatgaaattgagttgaaatatttccaaaattcttttgtcatagatttctctacatttgattattccggaacgaatagtactaaatatacgtatcggttagataattatgataaggagtggagtataccgtcttcgttgaattttgcagcttataagaacctggtacccggtacttataaattgcgggtgaaagcttgcaatggggtaggtatgtggggagataaagaaacgattttgaagattatcgttgttcctcctttttggaaaactacttgggctttctttatttatgctattttgatagggggggcgttatacatcactttcagactgatgcgtgactttaatactttgcgtaatcgtatacaggtggagaaacagctgacagagtataaattagtttttttcacgaatatctctcatgagttccgtactcccttgactttgatacaaggagcattggagaagatacagcgtggtggtaaaatccctaaagaaatggcttattcattgaaggtcatggataaaagtacccagcgtatgttgcgtcttatcaatcagttgctggaattccgtaagatgcagaataataaactggccctttctttagaggaaacggatgtcatggctttcttgtatgaaatttttctgagtttcaatgatgctgctgagtctaagaatatggatttcaagtttttgccatctgtagcctcttataagatgtttatcgataagggttatttggataaagtgacttataatttattgtctaatgctttcaaatatacgcccagtggtggaaaagtgactttttctgtgacggtagatgaagcaaggaaactgttggtcatatcggtagccgattccggtgtaggcattcctaaagagaagcgtaatgagttatttaagcgttttatgcaaagtagtttttcgggtagtagtgtcggagtcggtctgcatttgacacatgaactggtgtgtgtgcataaaggtacgatagtgtatactgaaaatgaaggtggtgggtctatatttacagtcagtttgcctactgatatttctgtttatgaggaaaaagatttcctgattccccataatgtgttgctggaagaggaggaagtacatcatgcggctgttcttgcaggagaaatatcggcgcaagaaggggaagtggaacttccatctgcaccacttaataagcggaaagtacttattatagaagatgataacgatgtacgtgagtttttgaaagaagaagtgggacaatattttgaagttgtggccgaggcggatggtccgtctggattggaacgtgcacgtacgtatgatgctgatttgataatctgtgatgtgttgatgccggggatgacagggtttgaggtaacccgaaaattgaaaaatgattttgatacaagtcatatacctattattttattgacagctatgagttctgccgaaagtcatttggaaggtgtggaaagtggtgcggatgcatatattactaagccttttagcccgaaactactgttggcacgcgctttcaaactaatagagcaacgtgagaaattacgtgagaaattttcgaatgatccgaatatggtacgaccggctatttgtacctctgataaggataaagaatttgctgacagattacaggtggttatggaacaacagattggtaatgctcagtttacgattgatgagtttgcttcgatgatgggattgggacgaaccgttttttatcgtaagatacgtggggtgacgggatattcacccaatgaatatattcggattattcgtatgaagaaggcggcagaactgttgttggaaaatcgttatacggtagctgaagtttcttataaagtaggtattaatgatccgttctattttagtaaatgttttaagcaacaatttggtgtggcaccttctgtttatttgcgtggaaaggaagagtccgggatacaggatacagaaaataaggactgatgaaaaacttttcttaaataagaaggtcaatcgagaataatatagaatagaatcggttgacctttttgctttaatggactatattatttagtatggcttgagactgattttagtcagtactttgcgacttacaatatatagtatccatgtacaagcagaagcggtaagtaatgctgctatttgtcgagtggtgtcagatatatctagaggcagagacgctccaagccaccaacctgccaaggctgcggtaacagtaagtaaggccataatgatgcttactcctaaaatgaacattattcttttcataaatggtttaagtttgattcaatattaaataaatgctatttcaagtcagtttgttcatgattatataaaaaatcgtgagtaaaagggatgtaaattaaaaaaggagtatcctctggaagaggatactccttttttatgtaggaatgataaatcttactgattaactcttttttcctgaattctagctttcttgccagtaagagcacgtaaatagtacaatttagcacgacgaactttaccaactttgttaacagtgatactgtcgatagccggagattcgatagggaaaatacgttcaacacctacagttccagacattttacgaacggtgaaacgttttttgtcaccatgtccagcgattttgataacaacaccacggtacaactgtacacgttccttgctaccttcaacgatacggtatgccactgtaatagtatcaccagctttgaatgaaggatgctgtttgccagtagcaaatgcttcttcagcaattttaattaaatccattttttttgattttaaattgtttatcgttaccaacgcaacatatcaagtaactcttctttgacagcgattgcgcgaaagcggtgcaaaattactagatttttgtcatacagccaaattaaattcaactattttttcatctgatatcgttggttgcaacttcttttttaactacatttgggcaataaacaactaataaacatgaaaccaaaccgaattatgtgtatgattccggcaggaatagcagccgggatttttatgttttcaagctgtcactcagggtattcactggcatcagttgagggaaacaggatagaagtgacagcagctttggatgctaacccggattccactgcaatcgctattttgactccgtatcaaaaaacggttgatagtattatgtcaccggtcataggacaaagcgctcgttttatggatcgctttcgtcctgaaagtgagttatccaacttggtagcggatattttacgttgttctgcttctgcatatataggccgcatagccgacgtgggggtgacgaatatgggcggactacgtacggctttgcccgagggggatataacttacggtaatatttatgaaataactccctttgaaaatacattgtgcattgttactatgaatggttctttgctgcgcgaactttttgaaaatatagcagctgtgcatggtgagggattaagtggtgcttgccttgaaatttctggagatggaaaattattggatgctacagtagccggaaaagaaattgaagactccaaagagtataaagtggctaccttggattatttggctgagggaaatgaccatatgactgcttttgctaaagtaggcgatgcggataaattgctgcctgaaaaggccacagtgcgtcagttgtttctgaactatgtgaatgagcagactaaagcagggaagaaaatagactcaaagatagaaggaagaattaccgttaaagaataaacagaaccgtcatgaaacgaatatatgtattatttactgctctgtgtgtatgttgtgtgctggcagcacaggatatcaaagaacttttgatacttcatactaatgatacccatagccgtgtggaacctatttccattactgacccgaatccggagtttgcaggaaaagcgggctttgtacgtcgtgttaccttaatcaaagaaatgcggaaacagaacaaggatttgttattgttcgattgtggtgacttttcacaaggttctcctttttataatatgtttggtggtgaggttgaagtgaagctgatgaatgaaatgggatatgatgccgggactattggaaatcatgaatttgattttggtttggataatatggcacgtctttttaaaatggcggattttcctattgtttgtgctaattatggtgtacagggaactgttttggagggtcttgtcaaaccgtatgttattttggaacgtaagggggtaaaggtaggcgtgttcggactgagtcctgcgttggagggattagtacaggcaaaaaactgtgaaggagtggtttttgaaaatccaatagaggccgcccagcgtgtggcagatatattgaagaatcgggaaaaatgtgatttggtggtttgtttgtctcatttaggatggcaaggaaaaccttattctgatgaaactttgattcctaatactcgtaatattgatattgtcttgggaggtcattcgcattcttattttgataagactttgttttataagaatttggatggcaaagagattccattgcaacaaatgggaaaaaatgctgtttatgtaggagaaatgaaagtaaggatggaaaagaactgatagttgctgttgtgtagggaaatctgatataattgagtaagttagatgaggagaaacatattgttatttataagtttatgtgttgtcggatgtgcgatgatgtatgcacagcagatgcctgggctgttacaaaaggggaaggcggacattcaggattgtaaggcgtgggtggatgaacagctttctgaaatgagtttgaaggaaaagataggacaactgtttatacacacagtggctcctcttcagacacaacgaaataaaaacaatatatatgcagctataaaagaatataaagtaggaggattacttttttcgagtggccagttgtctaatcaagttttattaactaattatgcgcagagtctggcagaagtacctttgttcattacttttgatggtgaatgggggctggctatgcgtttgaaaggaactcctcgttttccaagaaacagagttttgggatgtatacaggataatgaactgctttatgaatatggtaaggaagtagctcgccaatgtaaggagataggtgtgcagatcaattttgctccggtggctgatgtggatgttaatcctcggaatccggttattaatacccgttcttttggtggtgatcctcggaatgtggctcaaaaagtggtggcttatgctcgtggtttggaggatggaggggtattgtctgtctgtaaacattttccggggcatggagatacggaagtggattctcataaggcgttaccggttttgaattttgatcgtgcgcgtttggacagcattgaactttttccgtttaaagaggctgttaaagcaggactgggaggtatgatggtagggcatttggaggtacctgaattgggtaaaaatccggcttcgatttcttcacatattatttataatttactttgtcgggaattgggctttcaaggtttggtttttacagatgctttggagatgaaaggtatttcgcaaaatgagaatatatgcgctcaagccttgatagcaggcaatgatttattattggctccccgtaatttgaagagagaattggatggtgttttaaatgctgtaaaaagtggaaaactatcagaagaattgattacggaaaaatgtcgtaaagtattgacttataaatatgttttagggttgaagaataaacctcacgtccaactttccgggctggagaaacgattgaatcgcccggaaacgaaggagttgattctccgcttgcagaaagctgctataacggttcctgctaatgtaagtggaattttgcctttggattcaaaattgaagggtatggtggttctgaatattgggaaaactcccggtgcagggcttgatttttataatcgtttgcaaaatacactctctctcacacgcgttgttgctcgtccggattcgatggaagctattagaaaacgattgttgggtagtcagcgtgtaattgtggtggttacttcggatgattacaaaaagtataaaacaatgcttgattcgcttccggctgatttgcctgttgtttatgtgtttctgatgccattaaagtctatgttggatatggagggctactggaagaaagcggcggctgtagtattggggcatagtgatgaatctgttattcaggagtatgtggctgatgtcttggtaggaaaggcggtggcagacgggcgtttgtccgtggctgtcgccgatttgttcaaaccgggtgatggagtgactataactcctaaagtgcctcgtatttatagacccgaggattatggtatggactccaaaatactggaaaagatagacgggatagctatggaaggaatcaaagcgaaagcttatcctggttgtcagattctaattttaaaagatgggaaaccagtatatgataagtctttcggtactttcacttatgaaagtgaccaaaaggtggaaaaggatgatttgtatgacttggcttcgttgaccaagaccacggcgacgctgttggctgttatgaaactttacgatgaaggtaaatttggtttgaccgatcgcatatcccaatacattccagctttaaaaggcacggataaggagcgggtcactatagaggagttgcttttacaccagtcgggcattcccgctttttggcctttttataaggcggctatagataaagacagttataaggggactttttacaaagcaagaccggacgctagtcatcatacgcaaatagatgtacggctgtatgtcactgataagttcgattatagaaaagagttgatggcaaaatctttctctgccgattatcctttacaggtagctgacagtatgtttcttcatcgttcttttcgtgattccattatagcacaaataggacgtattccattaaaagacaggagatatcgttacagttgcctgaactttatgttattgaaggaaatggtagagaatatcagtaaaatgcctatgaatctttttttagataaagaattctataaaccgatggagatgaaccgtacggcttatttgccgcttcgacagtttaaaaaggaggaaattgttcctacagtgaaagcggattatttgcgtaaaggaaaagtgttgcaaggttatgtacacgatgaatcagctgctttcatgggaggggtgtcaggaaatgccggtttattttctacggctcgtgatgtggcaaaagtgtatcagttattgattgatggaggagtttataatggaaagcgttatctgagtagggaaacttgtgatttatttctaacccatacttcgaagatcagtaggagaggattgggattcgacaaaccggatgtgaataatagtgtgaaaagtccgtgtacggaagaagcgcctgaagaggtggtaggacatactggttttaccggaacttgcgcttgggcagatccgaaaaatcatttggtttttgtttttctgagtaatcggatttatccgcgtccttttgaccataaacagttgatgcggttaaatatccgtcctcgtatgcaacaggttatgtatcaggctttgatgaaataatcgtatttagattaaatacaaattagcgcatttttgtaatctctatgtgacaactaatagagaaaagctgtatatttgctccatcaattagtactaataatttaataattaacgaaaatggcttacgtaattagtgacgattgtatcgcttgcggtacttgtatcgatgaatgcccggtagaagcaatttctgaaggtgataagtattctatcaatccggatctgtgtacagagtgcggaacttgtgctgatgcttgtccttctgaagctattcatcttggctaagcaatacaattttgttctttaaagttaataacgatcgtttccgttgatggaaacggtcgtttttttgtttttcttaaagctttgtgttgattacaagctcgtatgtctactttatgaataaaaaaaacaggcaccacagaaaaaaacggatgcctgttctttttaaagaaagaatattttattttaatagggctaatgcttctttgatgcggcgcatagcttctataatattctcatcggaagttgcataactcatacggatgcattcgggggaaccgaatgaagtaccacctacacatgccacatgacctacttcaagtagatacattgccaaatcgtcagcgttattgatattgcggtcacctgctgatttgccaaaaaaagaatcacatttcggaaataaatagaatgctccttgaggattgtttacttcaaatcctggaatttcttttgctaattttacaataaggtcacggcggcgctggaatgcctgacgcatttcttctacgggagtttgagtgcctgtataggcagcttcggcagctttctgagaaacagagcacggacctgaggtatattgtccttgtagcttatttacagcttttacaatccattccggaccggcaatgaacccgattctccatcctgtcatagcatatgcttttgaaactccgtttacaataattacattgtcatgaatctcggggaattgggcaatgctttcatgtttgccactgtatgtgatatgttcgtaaatctcatcggctataacgtatacttgcgggtgctttgccaaaacagcggccaagccagccaactcttccttggtataaacagaaccggtgggatttgacggtgagcaaagaatcaatgctttggtcttgggagtaatcgctacttctagttgtgcaggggtaatcttgaaatcctgatcaataccggcagtaataataacaggagtaccgtcagctaattttaccatttcaggatagcttacccaatagggagccgggactattacttcgtcaccgttgttaactagagccataatcgtattacaaacagattgtttggcaccgtttgcacaggagatttgtgcagctgtatagtttaatccgttttcattcttcagtttggctacgattgcattgcgaagtgcaggatatcctggaactggagaatatctggaaaagttatcatctactgctttttttgctgcttctttgatgtggtccggggtattgaagtccggttcacccacgcttaaattaatgacatcaactccttgggcttttaactcattacttttttgggacatggccaatgttgctgaaggagacaaacgattcaaacgatctgataattgattcattgctattatttttaatgtgtttaagtttacttgctgcaaaataaaggataatatctcaattatgaaagtaaaacagacgaaatcgcatgaaaaatgatgtgatttcgtctgagttatagcttttttatttgttaaagtgcaatgtatgtcccattctgtcttttttggtttttaaataacgctcgttatatttgttaggcgtgatttcaataggaacgttttcaactatggacaaaccgtatgattccaatcctacacgtttgacagggttatttgtcagcaaacgcatttgggtgacacctatactgcgtagtatctgtgctccgactccataatcacgttcatctgcctgatgtcctaaaaggatattagcttctacagtatccacaccattttcttgcaatttgtaggctttcattttttccattagtcctatgcctcttccttcttggtttaaataaacaacagcgccttttccttctttttcgatcatttgcaatgctttgtgcagttgttctccacagtcacaacgcatggatccgaaaatatcaccggtggcgcaagaagaatgcacgcgtaccaaaacgggttctccttcttttatgtcaccttttataatagcgatatgttctaaaccattacttttctggcggaaaggtatcagacggaaatggccgtattcagtcggcatgtccacttccacccctttttctactaatgactcttgctttagacgataggcgatcaagtcacggattgaaattagtttcagcccccattcatcggccatttttcttagttcgggcagacgagccatggttccatcctcactcatgatttccattaatgcggcagcagggtagagtcctgctagccgtgccatgtctatacaggcttctgtatgaccggcacgtctcagtacgcctttgtcttgtgcatataatggattgacatgccccggacgtccgaatgtttcgggagtggaggtggggtcggcaagagcacggatagtggcggcccggtcgtagatagaaactccggtactgcaaccttccagcttatccacagttacagtgaaaggagtacctagaactgacgtgtttgtatctacttgatgaggtaattccaattctttgcaacgagaaatagtgataggtacacaaagtacgccacgcgcatgtttcagcatgaaattgacttgttcgggagtaattttttccgcagcaacaattaaatcgccttcattttcacggtcttcgtcgtccactacaatgacaaacttaccttcacggaagtcagctatcgcttcttcgatggtatttagttttaattcttccatagtcaaattataaatgatttattgtttattctttcttgaatttcacggttggtcttgattatgttttttaaatctttatccagccggatactgaaccgccaaatgcggaaatagaagaacaggcctattggtacaatgattcctgcgagtaaattcagccattggttgtcaaacggacttttgtgagctttggtggacaaaatgggatatctatttaagtattccagtaatactccatctttgctgttggataattcttctatgagtagttccattttggcgctgatatcggctatgatgtcatcatgtcctttgttggtgaagatgcggatataattaggtgcgtcggccagtctatgcttgatggcatactcgttacagatgttgcatagtttctccagttctgtttgtatgcgtggatagtccggatcttctataataacttcttttttgaatacatggcgcgaggggcgcagacctaacagcatacggaagaaattgatatatacttcggcattgaataccactgagtcattattcgacttataagtaaagaaggctccgataggtgccaatacaatggtactcatccaaacacctaataccatattcatttcaccgctttttgctactcgggtagccccggaatcaatgatataatagattacaaaaatcaagacggataccactacgggcattcctaaacctcctttgcggatgatggctcccaaaggcgcaccgatgaaaaagaaaatcaaacaacttatagagagggtgatttttttgtgccagtcggcttcgtgttttcggatattgttgtccgcatctgtagtttgataacttttcatgttccattcactggccagtgactcggtgcgatccgccgcactacccagtgtcttatctttttcagctaaagtataggaattgaatagactgtctacattgattttgctgtttgtttcaactatttttgcggagtctgttttcgataatatgatattgcgataagtcgaggcttttatttcattgtacatgcttcttcccaaactatcggcgcggtggctcagcgagtcgatggactggctgatttcaatcatattcttgctgtccgaacggtcacttaaaaaactcccatctaccatgttgaatccgccgtcaaattcaataatggtatgtttctctctgaaggtttcacgtcgataggggacattattggatgaaatggtctgcgatttcagattttcgaactgttctccgttatacagatgtaggtaaagatgttgtttgtctgctgtcatctccatttttccttcggaagcccatataatgtgagcgttttcaaacccatctgaaaagttgtagatcagtacatcttttagcattcctgtttcacggtctttctgttttacatatatattatacccctcaatttcgtcgtaaaatacaccttccggaatatccagttctggtgaagtttgcttcatggatacaagtaaagtaagcaatttgatctgcgctttgggggctatgacattttgaaaataaaacgaggtacaacacaggaaagtacaaaaaataatcagtggacgtatgatcctcaataagggaatacccgctgctttcatagacagcaattcatatctttcaccaaagttaccaaatgtcattaaggcggctaataaaatagccaaaggtagggacaaaggtattaaggtcagagcagaataaaagaaaaactgtgctaaaacactcatctccaatccttttccgaccaactcgtctacatatctccataaaaattgcatcatgaagatgaagagacagatgaaaaaagtacctataaagagcatcaaaaagctctttaggataaatatatctaatttttttatgcgtagcattatttcattttgtgcaactatcaaggcacaaaattagcataaaaaacggagagcaaagacaagttttgcatatttttatagaattacagtccgcttaccctttttagcttttctatttcggaatcccaaagttctttcatatcttctacttcatcgggttctgcccaatcaatcacttccagcatatagtcagaggtcagttcgttatagaccattttcaattcaaaataggctttaggatcttcatcatccagccatcgaaagcgtataaaactgttaacccggaagtttgttacttcagcttgccgtgtttctgtttttccccaataaaaggtgaatactttgtctttgaatgtcaccttgtctgcaaaccatgtttccaggccggatggggtactaataatagaccatacaatattaccggatccggctttcaacatgtactccaaacgaattttttcttttcccataggttagctttttaaagtttcggtggcaaattaagccaaattttcttatttgccataataaatgctatgttttttgaaatatttattagccacatactaagctgtttttctctttaaaaacgaattttacaagaaaaagttctctgaaatgttgcaatattcaaaataaccttctatctttgcacccgcaattgagaaacgatggcgggatagctcagctggttagagcgcatgattcataatcatgaggtccccagttcaatcctgggtcccgctacaatgagcgatattagactgttgagaggcttccactcttggcggtctttttaaaaaacgatggcgggatagctcagctggttagagcgcatgattcataatcatgaggtccccggttcaatcccgggtcccgctacacaaaacaaggtatttatgagtttgtttcatggatgtcttgtttttcttttattttatgtggacttatttttcttctcataaagaatcacatttgaataattttatgtagatttgctactcatatcaatcaaagttgtaacttttgctgaattatgaaaaacgcattctatatggaagggaatttatggctatatagattatatctttgggtggcaattttattatggctacctgtatctttaccggccgttgaccttccgaatttaacttttcgtactattactatttcagacggcctgtctaacaatattattaatactatttataaagataaaagaggctttacttggttgggcacccagaccggattagatcgttttgacggtatcaatgtgaaaagttttcttcagttttcaggacgtaccattttttccatagccgaaacagattctgtttatttgtgggtgggtacagataaaggattatggagacttgataggaaaacagaccaagtgaaattggtcactttggatacaaagtcgttggaagttagatcagtatttgtaagccagacagggcgattactggttggaacaactcacggactttttatctatcaggagaatactttcaggaaggtgcttttcggatcaaatgctttgtcttctactaattttctcactggcattgttgaaggacataaagatactttttggctgacttcacaaggtggtttgatagaatataatattgtaactggtcaatcggaagtctatacatatcagggtgatgagaggtttgttaattatttttcttgtctgactcttttaaaagaaaagctatatttaggaacagccggcaatggtatgcttgtttttgatatcggtaagacggctttttctatttgtcctgaagtggaaaatggatatataaaaagtatcattgctgttaatgatgagatatgggtgggaacaaatggaagcggtattagaataatcagtgcgtctacaggaaaagagttgtcggctatagagcatacttcgaatgcggatgctatttgttctaatgcagtttattctttgttgaaagaggatgatatgctttttgtaggtacttacatgggcggattaagttatactccggctcatggaagtttcttttctgtttattcttatccagagctttttaattcttataatatgaatgtacgtgctttttgggtggatgcagatgggaaaaaagtaataggcacgcgtgacggactttattatatttctgaaatggaacgaaggataaggcattatacacaccggaattccattttgcgttcggatataattttgtctgtaaaacctttcaatcgggattttttaattggaacttatggagggggcttgtacttgcttcacaggaatacgggtgaactttcctttcttcaatcagatcaatgttttatgcaagggtcatttaatggatatgaaagggatgtaaataataaattatggatcggcagttccaaaggtgtgtatgtatatgatcatttgacaggggaatatgaggtttataacagtcgtaattcttctttgtcggttaattctgttttttcattgaaggcagattcgaagggcaggatgtggctgggcacgggaggagccgtttttatgtatgatagggttgatggagtatttaaatcggatgtttttccggaacatgttttgccatatactaaaagtgtacggttcatttatgaggataaaaagaagaatttgtggttttgtgatgataaggagggggtggttaaggtagatgagtcttttacgacatttgaacacatcacgatcaatgatttcttaccgaataattctgtgatgagcatagtggaagatcctaagaatggcggattatggtttgctactcagagggggttactatatataaaagaagaggaaaattatcataagattttttcgttatacgatggcattcccggatatatttttaattctccggtacagataacggatgataatacggtttggtggggaaatgaacgaggattggtctgttatgatgcagtaaagagctggagtgagataggaacaaaaaaggtccagcctcccgtgattacttccatttcagtcgcaggcagacctttgtgcccgggagagacattaatgcccgtttctgctccatttatagatgaggtgtttctgtctgtaaatgataataatatttcattcactttctcagccttgaattatgcagtggagaatacggatttatacgagtattgtttggaagaatatgataaggaatggaaaactttgatgaaaggaaatcaggtttcttatacagaacttcctgttggcgattatatgtttagggtcagggcggcttccaatcctgcagcaataaaagcggtaagggtggttgttgccggaaatacgccttttataagatggattgtggtgttaagtgtagtcgtttgttgtattcttatttatttttactccaggttattggggatgtatcgcacaatgaaggaatatataaataaaaagacggaaccatccgaagaaaaccggaaagaaaaatatcaaaaatcaaggatggaagagaaaacggccatgctcattattgggaaactgaatgagtgtatggaaaaagatcggttatatttgaatcctgatttaaagttgcaggatgtggcaaaagtggtgaaatgtaatactggagagttgtcccaagtgctgaatatgtttatgaatattggtttcacggattatgttaataaatataggatagacgaattcataaaaagaatacaggataagtctgcctccagatataccttggtttctttgtcggaacaatgtggtttcagttcccgtacttctttttttcgttcgtttaagaagtttaagggaatgtcacctgccgaatatataaaggaacatgggatatttataaagtagcgtttggaataggggtgttactctagtgattggatagaagaagagagtttcatatttttttgaaactctctttcttgttgtgtaatttgttgattcatagtgctgtatggtttttttgtttcatctagtaggttgggattaatcctactttacaagatggttgaaaagacatttcagtttctaattttgctgatagaaaaatatttttatccattaaagaaactgatacgattatgaaaagcagaactttttttactcttgtttttatctttttagttagcataggatgtttttcatgtaaaacgactgctactgatgattttcctgttgattcggaaattgcgtattgccggtctcaggctatgcggacgctggtttctattccttcgttagataaaattcctaattctatggatttagatagtattaaatggcgttatacacaggcaggctcttggacttgtggattttggcctggtatcctttggtatttatatgaggatactaaggataatatgtggagggaagcagcaggaaaagtaaccgatatgattgctcccttggcttacaggaaagcaaagagtcatgattccggttttattatgatgtgtagtttgggcaacggttatcgtttgacaggaaaaccggaatataaggaaggattgctgcatgccgcagattctttggctatgctttataatcctgttgtgggtactattttatcttggcctggaatggtgaaaaaggaaaactggccgcacaatactattattgataatatgatgaatttggaacttttgttttgggctgcgcggaatggaggggggcagtatttgtatgacattgcctataaacatgcggaaacgactatgaaacatcaattccgtaaagattattcatgttatcatgtagcggtgtatgatacgctggatggtcattttataaaaggagttacccatcaaggattgagtgatgattctatgtgggcccgtggacaggcatgggctatttatggatataccatggtatatcgtgaaacacatgatgtgcgttttttggattttgctcggaaggtatcggatgtctatttgtcccgtcttcctgaggacatgattccttattgggattttaatgctccggaattatcctcaggtgaaccgaaagatgcatcggcttctgccataacagcctctgctttattggaactttctacctatataaatgatagtgattctgcatttttctatcggaataaggctgtggaaatgcttcagatactatcctctccggcataccaggctcgaaataaaaaagatgcttttttattgcattcggttgggcacatgaacaagggatgggaagttgatgcttctattagttatgcagattactattatttggaagcattggtacgattgaaacgtttgaaagagaaacaatctgttttggctaatttataaaaccattgttaatccatctatattatgaatacacaatctgttaataccagtctttatcaaaaaggggatatctccttggagagaatttatggaaaatataggaatagttttattagatatgccggaaaagtgctatctgatgaattttatgcggaagatgtagtgcaggatgtatttacaggattgtttcagcaaacaaattattttgtgtctgaaatggctgcattaaaatgtatttatccttaattccgcaacactattacaaatataactttttaagtacctgagcaacaaaaagttgctcaggaatttgccatgtcagatttttcacctatcttagtgttgcaaatcaaaatatgtatcaaacccgacagacatggcaaaggtagcaattaaatccgagaaactcactccttttggaggaatattttcaataatggagcaatttgactccagactctcatctgtaatcgactcaaccctcggtatgagatgcaggctgtatggttatcaatacagcgaaatcatccgttcgcttatgagcgtttatttttgtggcggctcatgcatcgaggatgtcaccactcatctgatgtaccacctttcgcttcatccgacacttcgcacatgcagtgccgacacgattcttagagccataaaggaactgacccaggataacatttcctacacatccgacactggcaagacctacgacttcaacacggcagacaagctgaatacactgctcctcaattgcctattgtccacagggcagctgaaagagggcgaggggtatgacgttgacttcgaccaccagttcatagaggctgagaagtttgatgcgaagcctacatacaagaagttccttggttatcgccctggcgtggcggttattggcaacttgattgtcggcattgagaacagcgacggcaacacaaatgtccgtttccaccagaaggacacgctgaagaggttctttgaaaggtttgaacaaaacaagcttattatcaaccgtttcagagctgattgcggctcgtgttctgaagagatagtggaagagattgctaaacactgcaagaccttctatatccgtgctaaccgatgcagttcgctctacaatgacatctttgccctcagaggttggaagaaagtggaattgggcggcattgagtttgagctggcctccattctcatcgagaaatggaaagggaaggcataccgtcttgtgattcaaagacagaagcggatagacggcgaactcgacctgtgggaaggagaatacacctaccgctgcatccttacaaatgactacgagtcttccgagaaagagattgtcgaattctataacctccgtggagggaaggaacgcatcttcgatgatatgaataacggattcggctggaacaggcttccaaaatcctttatgggagaaaacacggtgtttcttctgcttatggcactcatacgcaacttctataaattcatcatggcgaggcttgacgtgaagaggttcggactcaaagcaacaagccgcatcaagacgtttgtctttaagttcatctctgtgccagccaaatgggtcaggacatcaaggaagtatgtgctgaatatctattcatgcaacaatgcttatgccaatgtgttccagaatgactttggataacaccgacaacttatagtcgtgattttgcgtattgcctcaagtcgcatggtggggtaaggggcatttatatgtctttatggtgacattcgatgcactgtgccccctttttactaacgatgcagattcttttcgcttctgtatcatattaggcgcgtagttgcggatttgaggtttatattgctatctataatcgtagtattgatatgttgcgtcataaacagattgtgcagcattatgaaactgcacatagtgataaaaaaagggaagaagtcagtattggtgaatataatgagttgcttactaaagaattttttataatagttgaaaatggaatagatactttaccacctaaatgtaaacagatatttgtaatgaaaagtagaaaatcactttcgaattcagaaataagtaatcttttaggtctgtctcttcgtacggttgaaaaccaggtttatattgcccgtaatgtattacaaaaatatattgactcttatttatgctcttaaattgatgataatatgaaaagactatttttaggaattttagcaatatgttgggttattggtgtgaaggcgcaagaagtgttctcacctgatggtaaaattaatgtgcgattcttcttgtcggaaaaagtatcaacaggaaatcagagaatgtatcccgaggggactccttattatgaagttttatatgataaacattcgtttttacttccatcacgcatggggttcgatttacttggaacggctgaaatgaaacattattttaaagtctctgatattgaatatgccgaacataattttgtttggaaaccctgctatggtgagaagcaagaatatcccgataagtatagggagatgaaggtcatgttggaagaaacattgtatccatataggaaattgtatgtcatctttcgcacttataatgagggaatagcttttagatatgagataccttatcagagtggctttgaaaaagtggtaattgacaaggaacttaccgaatttgcttttcccaaaaacacttcggtatgggagtctcatgggcatgaaggcaaatattataaagtatatccttttgaagtaaaaacggattgtgaacttccattgacatgtcaaactccgcagggagtttatggtgttataatggaagctgggaataaccattatccacgtgcttacttggaggctccttataggaaggaggatattttacgcatctctttacggggtgaagctaagggagaaagaggaatggtcactgcgtggcgtgttataagtttggctgatgagccgggtaaactaatggaacagaattatttgttgtataatttgaatgaatcttgcaaattggcggatacttcttggataaagccgggaacagctatgagggaaacgacaatttcaaccccggagtgtttgaagatgattgattattgtgcatcaatggggatatcatatatgattttggattggggatggtacggtttggcaaatagtcataaatccgatccttccattgttaatgtgaccaaccctgcaaccggacagccgatacctagacatccgggattggatttgccaaaagttattaactatggaaaagaaaaaggagttggtttgttcttatatgtcaatcgccagggcttggaacgttatgcggataaaatatttcctctttatcaaaaatggggaataaaagggataaaacccggttttgtgaatgttgggaatcaggaatggcaagaatggatagaaagtatagtggctaaagctgcaaaatataatctgctggtagatattcacgatgcttaccgtccgaatggttttagtcgtacttatcccaatttgttgacacaagaaggaatacatggcaatgaacaagttcctaatgcagaccataatacaatgctgccgtttactcgttttaccattggtgccggagattatacgcccggatatactcgtaaggatttacaaacaacctttgcccatcgtttagctttacctgtcatttattatagtccggctcaatttctgttctggaatgaaaaacttaccgatgaacataaacgaccggaattggacttttggaagaatattcccacggtgtggcaagatacaaagttcttgcttggggaaataggagagtatgctgttgtcgcacgccgttcgggaacaacttggtatgtgggaggaataaccaataccaacgcacgctgtttgcaattagattgttcgtttctttcttctgataaaaagtatatagcgacaatttacactgatgatgttgaagttcctggaaaaataaaaattacgactcgaaaaatcaccttaaaaacaaaacttagttttatgttacaacgttcaggaggtttttctttgaaaataatggagttataaattataatacttatgaaaaaatacatcttattctatttgttgttttgcctgtcagtgggaggttgggcaaaagactttgtccatcccggcattttgcattcgtcggaagctttgaggcgtattgctggcttggtgaaaaatgatgttaatccttcgatgggttcttttaataaattgaaggctgaaccggaggcttcttatcattattgtatccaggggcctttccgctttatcagtaggagtggtgaatacggatatactaaatctccttgtgaggatgactttaacgcagcttattataatgctatcatgtggaatattacgaaagataggcggcacgctgataaagcaatggaaattatccggaattatgcagcaacattagaaaaaatatttccaatggatgcacctctttgtgctggtctgcaaggattcatattagtgaatgctgcagagataatgcgttatacttatgtggaagagcataatgagaatggttggacatataaggatactgaacagacagaagacatgttcaggaatgtatttcttcctatattgtcagagttctataaaacgaaaccttacaccaatggtaattggggaatagctgtaacgaaagctcagataggtatttccgtatttttaaatgatacaaaactttatgatgatgctcttgatttcttttatcatggaaaagataatggtactttacctaattatgtagcagaaacagggcaaatacaagaaagtggtcgggatcaagcacattgtatgcttggtataggttgtttggctgaaatagcagaagtggcttggaaccaaggagatgatttatatggagccttggataataggattatgaaggggtgtgaatatttatcaaagtctaatttaggatatgatgtgcctttccatgtgtggaaagatttgacaggaaaatattctaattggcagtctttggggcaggccagtatgggagagttcagagctgtgtttgaattaccctataatcattatgtggaacggaaaaagatggagatgccatatactaaaatggtattgaatcgtatccgtcctgaaggagccggatttacctgtgataatcccggattcggaactttattgttctatttgggaaaggatgaggaacgagaacgaaaaggtcggataaatgaaaacttgaaagagaatttattcggatggcattttgcagcagcttcattgaaattaaaaggtgataagatgatgttgatgtcttcaggtatatcctgtaaaaaaaaggggatcatgtatgatgctggatcttatccctatattgcaataaaaatatctcatttgcctaaaaatcataataaaaactggtttgctctgagctataacgtgatgagtgctcctgagttttgggtgtttggagagtcggacgctcaaataatggatgggaatatatatgtgtttagtattcacggagcaaaatctaataatggaacagaattctcaaaacgccttactaacgtaactttattaatggattttggtgaaaccggaggtgaaggggtagatgtggaatggattcgttcggtagcggatttggagttttaatgccgataaggtataaaaaataggtttttgatttgagtgaagagggaagtcttttcgtttaagaaacaagagcggcataatgttataaactttaatattttagtattatgaacaacaaagacaaatttttgatgtttctatcgttgatctgcttgccatttggtgaattggctgcagagcaaattggaaacatggaggtatttccaataaatcaggagatacagcaaaatgtaaaaatcacaggtcgtgtgattgatgctggtggagaagcgattataggagcttccattgtggaaaaagggactactaatggcactattacggattttgatggaaatttcactttgaatgtaaggacgaatgcaaagttggttgtatcgtatgtaggatatgttactcaagaagttatggtaacccctaataaagagttgaacatcgtattaaaggaggatgccgaaacattggatgaagttgttgtcgtaggttatggatctgttaaaaaatcagacttaacgggtgctgttgcttcagtttctacaaaagatttaatacggagtggtaatacggatgcggtaggggctttgcagggagctatgtcaggtgtacagatttcacgttccagcagcaaaccgggaagtgaatataatatcttaatccgcggattaaacacaatcagtggcagtacttcccctttggtggttattgacggtgttcaaggcgcatcactttccaatgtaaatccggatgatattgaacgtattgatatcttaaaagatgcttcttctacagctatttatggttcacgtgcatcaaacggagttgtattggttactacaaaacgagggaaaaaaggtactgcaaaaatcaattacagtggttatgtcggttttcgtaaatatacaaatcttccggatatgatgtcaggcgatgaatatgtacagttggctcgtgagtcggttcgtgcgtcaaataataatgtctataagtctgatagcgagatttttacttcttccgaattgaaggctattgaaaacaataattattttgattggttggatgctgtcacccatacggctttgatgaccaatcatacggtttctgctgcgggaggtaatgaagtgactacttatgctatttcagcaggttattattatgaggatggcatggtggatcccgaagaatattcacgttataacttgcgtgcggctgtcgatatacaaccgaaagattatttaaaatttggaattaatctgtatggagcacatacagtacgtaatacgggtacgggtattttgactacagctatgagaatgcgacctacctatcacccaactaatttggttaccggggaagaggaaactaaatattctaacggtcgatataatcccttacttacacaaaagaatgcgacaaataaaaataagaattataatatgatgggtaacctttatttagagattctcccggtaaagaatctttctttaaagactactttctctcccaatatacgtttttatgatgtcggacagtatcttggatcttatacagaaaatcgtggtgggaatttggcaaatagtaattatgcaaaaaatagttataccaattggatgtgggataatcagattagctaccgttttgagaagaaagagcatcgttttgatgtgatgggagttttttcaatggtgcaaaatcaagatgaattgttaaaaggcattggcaatgaactttcatacaattcattatggtataatttacagggaggtactactaataattcgacttccggatatacaaaaaccagtttgatgtcctatttagcccgagctaattactcgtttcgtgataactattttgtaacggcaagcattcgttttgacggttcttcaaagttagctaaaggtaatagatggggtgcctttccttcggctgctttggcatggcgtttgtccggtgaagaattcttaaaaaatgttgaatggcttgataacttaaaagtccgtttaagttatggtcaaacaggtaatgataacgtaaaagcttatcagactgaaggggctactagtgccgttaattattatatatttggtacgacggatgcgcaaggttatgttccgggtaatatgcgtaaccccaatttaggatgggaacgtactaccgagtacaatgtaggtttggatttcggttttttggggaataggatttcaggtagcgtggagtattacaatcgtttgaccaaagatttgattatgaataaaacgattccggttaccactggttatacttcagtaacagctaatgttggttctgtacggaataccggtatagaatttttgatcaattctgaaaatatacgtaccaaagactttacttggcatactcaatttaattttgcctataataaaaataaaattgtagatttggcttacaaagaggacctttctcctcgtggattatctttgcagggtatggtaggtgattataataatttgtggattattggtcagcccattgatattaatttcagtatgatgactcaaggggtctatcaactggatgaagaagcggaggctgctaaatatggtgcgcgtcccggacattataaaccgttggacttgaataaagacggagaaataactgatgccgaccgcgttattaatggtaaacatacaccagacttcactggtggtatgacaaatacctttacatataaagattttgatttgtcattccaattatcattccaaactggtgcaaaagtatataaccaatacttggtttcttttgctttggaatataatacacagaattttaataatctgcgccgggagtattggacgccggaaaatcccactaatgactttcatcagcctagtagtagcgatccttatgaccgcgacaaaggccgtagtgatacatggaatagggatgagtcaaaagcttgtgcgtcacatcgtctcgggtctactgattatttgaaaatcaattatctttctttggggtatacttttaatggtaaatgtattaaaaagatgaatttagggaacttgaggatttatggaactgttcaaaacccttttatctggactcgtgataaatatgcattcaaccccgaacaaatgaatgttgctatcggcaatacagactttatgacatgcaacgctattttcggtgtaaatgtgggattttaattgaagaactttaaaatagaaagagactatgaaaacaaaaaatatatttgcaaaaacattattcctgacggtaatgttcgttattcccggatgttcgtcgttcttggatgaggagaatatcgccggacaatctgctgaagaatattttgctacggctgtagggtatgaaagcttgataaacggttgttataacacattgaagtctgtgtataacactactaattataatgtgatatctcaattgggcacggatattgtgacgcagaacgatatagacgcacctagtcttgcaactttaaataaatatattttatatcaaagtgataatggttttgtttatactcaatggacaaatttatatgcagctttgaagaatgttaatgctgctattgatcgtgcttctaatgtaataactaaaactcaagatccacgtgatggtatggatgagtccattttagctaagcgtgttgctgaagctaaattcttgcgtgcactctatttatttgatattgtcagaaattggggacaggctccactcattttgcatgaaccaactgaggtgtcaactgtgtcgcagcttgatagtgctgataaattttatgagcagatcttgacggatttaggggatgttatgaattcagctctgcctatgaggcagtcggcgagtgaatatggacgtgtttctaaggctgctgctaaacatcttcgttcattggtttatcttacacgtggttatcaatcttatagtgtggcatctgattttactaatgctttggctgacgctgaagatataattcaaaattcggggcatacattactttctgattatgctcttgttcatcggcagacgaatgaagagaatgatgaaattattttctgtgtgaattttgctaataaagataaatattgggggaatctttggtcagagttttatatgcctgtctatcgggaaggttgggtggatttagctcctgacaatatgtatggcgcggatgctgcagcttatacaattatgcctaccaaatatacctatctactttttaattggaaaaaagatcaacgtgcgcgggtaacatttatgtcaccttataatggtgatgctactacttctattgatggacgaacatgtggaaataattatttcctaagtattaatggctcagtggttccaaagggggagcctgttatttattttcctgttccattggatggtagctttaataatcatacttatacacaggctgagaaagatgctgcaaaacaaagggggcaatattattttaattatccatctggaacattagctgagaaatcttataaaaatgtttcaaatgatgattattatataaaaggaaatcaaggtggtaatgctggttctcgtacatggttgcccgtatggaaattcaaagatgccaatatgcagcatggaggtacaggtggttctgttgggcatggttcgcgagatatctatatgttccgtttagctgaaacttatttgattgcagcggaggctgcagtaaaagccaatgataatgcaaaagcattgatgtatatcaattttattcgccaacgtgcatcgactaacgctcctgaaggtggattgcctctttattcgggtacgataaccatagatgacgtgttggatgagcgagctcttgaattatttggagaggtttctcgttggaatgatttgacaagaacaggtaaattggctgagcgtgtattggaatataattgggatgtttcaaatattaatggtgcagttaaaacagagttgagtgcaagtactaatgctaaatttagtcttcgtccaattccccttgcttggttaaattctttgtctaacggtcaggaattaggtaataatccaggttgggagtaatgtgttgataatataaaaagataatgtcccgacaataaactgatagtgttgggacattatttgtataatgaagagggtgagtatgtatttttgagtacatatatggagtaatctattattctgtaatgtgtaaaaagacatctttttgtagatttgaaagtatagagatattatgaagacattaatgagaaaaataatatttattcctttatggattttattgtccatggtatgtgtaaatgcgaaggtggtggtatatcctgcacctgtatctgaaactttgtcagtcgattatgtgatagaagtagatggaaaaccgatacccgtatatacggctttaactcaacatcatgataagaaatattcaattgcgtattttgatttttctggaagtgctactgtaaaaataaaaagtaaattctctttagaaaagttgatagtcttgcccaataaatatggtatttgtccttctattcatcaagatgaggctatttttcaattagataaaccctgtgacatttcttttgaaccaaatggttgcaacagtcctttactgctattaactaatgagatagaaaaagatattccttctaaggataatccgaatgtcatttattttggtccgggcgtacataacccggagaatgggttgataaaactgagtagtaatcagactctttatttggctggaggagcaattgtgaatgcgggcgtggaagctactggagataatattactatttgcggtcgaggtattttagattgctctgattgggaacataatgctggacctaccgattatatgattaatgcgaaaaattgtaataatttcgtaatgaaagatgtgatattaaaaggtgctttttggtggactattgttcctcagaattgtgaccgagtattgattgatcatgttcgcttggctggctcaagggttggtaatgatgatggtgtggacccatgcaattcgagtaatataacagtacgtaattgcttttttcgtacagatgatgatgcaatttctcctaaaggaatcactcgccaaggaggagaaaaactttcaaaatctgtagaaaatatgttagtggaagattgtgtattttgggtggattttgctaatgtgtttagaattgctacagaaagcagttgccctgcgattcgaaattttacagcgcggaatatcgatgtgattcattttcccaatcgtaatcaagtgcaaatattttggttacatccaactggagaaatggttatggagaatttgacttttgacaatataaaaattaatggtgagattccttataatttgattaaattaactccggcattgaatttggtgggaactcgtcctataaagcagcctactcccaataatataaaggtgggttcgggaagacgtggtataggtagtcggggttatggagaatttgtagttgtaccatccaatggcccatttattcataatgttacttttagaaatatcagtacgtatggtggagaaacagcttattgtaatgaaagaggatttgttttacttcaaggaattgatgaagaacatgatgtttctaacataacatttgataaagtgagttattttggtaatgtaattgatggagaaaatagtaaagtgaaaaagaaccaatatgtaaaacatgtacgatttataaaagaataaaatgatgaagatattatgtatactaggattatggatggcattttctttatccattcttcaggcaaaagaaataaagatgtcctcgccggacggtaagtatcaagttactttaagtgatgaggggggaaatctgcattattctgtgaattggaatcataaagaagccataaagccatctttattaggtattaatgccaatgtggtttggcgtgaccaattggcattgggtgatataacaactgctgaacaggatacggtgtggcatcctgtgtatggagaacgtagcaccattaaagatcggtataaagcttggtcggtagtcattaatcgtcagcactcccgtgaaaaattggttttggatgtgcgtgcatacaatgaaggtatcgcattccgttatcggtttcccggtggacaatatttgaagatcaccgatgaattcacagaatatactttaccggaaggaacgaaggcttatttcactgctagggcccaaactccctatgaatgtttaccgttggaaggatggtccggtgaatcagatcgcccattgcttctgatattgcctggaggcccttatgtatgtttgggcgaagcacaagtggtggactatgtgcgtactaaatttaaattatctgttgaaaaaaagaatactattcaatctgccatgtacggtcctgtagaagatattgcgccttatcatactccttggagagtgattatgtgtgccgataaaccggggcagatattggaacacaacgatttaattttaaatctgaatccttcttgtagaataaaagatacttcgtggataaaacccggaaaagtgatgcgtgaggtgaccttgacaacagaaggagggaaagcattggtggattttgcagtaaaacgcaatctgcaatatattcattttgacgctgggtggtatggatttgaatatgacaaggcatctgatgccactaccgtgacattggatcctcgtagaaatccgaatgtgaatgctttgaatctgaaagaagtggtagcttatgcaaaaaaacggggaataggagttatcctgtatgtcaatcaacgtgcattgcaacaacaattggatgaaattcttccattgtataaatcttgggggatagcaggtcttaaattcggttttgtacaagtcggttcacaagtgtggaccaaatggatgcatgaggcggtaaaaaaatgtgctgactatggtttgatggttgatatacatgatgaataccgtcctacgggattcagtcgtacatatcctaatctgatgactcaggaaggtattcgtggtaatgaggaatttccggatgcaacccataatgtcactcttccttttacccgatttgtggcaggagcggcagattataccatttgttattatcgtcaggatttcggccgtttgaatacggataaggataattatggagttccccgttcaaagtccattcagaccactcctgcgcatcagttggcgttggcggctgtttattatagtccgctgcaatatatgtattggtatgataaaccatcggattctcaagatgaacccgaattgaaattctttgatgatatttatactacgtgggacgacactaaagtattacaaggtgaaatcgggcaatttatcactatagcccgtcgtaaaggggaagagtggtttattggttcgataacgaataatgaggcgcgtgcattgccggtaagtttggattttcttcctgaggggaaaaattatgttgcagagatttatacagatggggagaggtcaataaagacacgtaccaaagtaaaatgttctcgatatagagtaaattcaatgacaaaattgaattttgaattgaaagcgtcaggcggttccgctgtgcgcctgataccagaaaaggacgtaaataagaaattaggaaactacaagaaacaaaaattatgattccggaaaataataggttacaacgaattttttttatatttataggtttgatcttgacttgtcggacattcggaatggatatctgtgataaagtggatgaggacaagaattatattgatttggtgaatccttttgttgacagtcatcgttcccggtggtttttctttagttcagcgtgtcgtccgtttggtatggtcagtctcagtcctgatacggataccgagcactcttggggatcgggatatctatatggctcaaaacaaatacgttgtttcagccatgttcataattggcagatgtccggagtggcagtgatgcccactgttggagaatttaaaggacatttaggaatgaacgcctatcagtcggcctttactcatgacggagaaatagctaagccggggtatcataaagtgaggctgacagactatgatataacggcggaactgacctctactatgcgtgtaggttttcattgttatacttttccgaaaagtgattccagttatattctatttgatacgggagcttttctggcacatgggcctacggcctattcggaagtatggaaagtgagtgacaaggaaattgccggatgggaaattatggaacgtacgggacgccgtcctaaggatacacctgtctatttttacgcacaattgagcaaaccgatggatgaagttgtgtcttggcgtgaggggcggctggaacctgacagtaatccggaaagaatatcgggtaagaatgccggtatggcagttcggtttaaaacaagaaaagacgaaaaagtaatgctgaaagtcgcgatttcgtatgtcagtgtagaacaggcacgtaagaatatgctggcggaacttccgggttgggattttgagcaagtgaaacaggcctctttttctgaatggaatgattggcttggaaggatagaagtggaaggcggtagcagagaacagcaaataaaactctatacggatttgtggcatgccttattgggacgccatgtagtcagtgatgccgatggacattatatggatatgacttccgactttccgcgcatacggcaaattcctttaggagaagatggaaaacctttgtataatcatcataactttgatgcatggtgggggagtcattggtcactaaacatactctggtctatggcatatcctgaagttatggataatttctgtaatacaatgacagatatgtatcaaaacggaggtctgattccccgtggaccatcaggaggaaattatacgtatgtgatgattggcgatccggctgtctcttttttcgcttcagcctataataaaggaatctgtaattatgatgcggaactggcctatgaaggtttgcgaaagaatgcttttgtgggagggattcgcgaccacgccggttatgagcatagcaagaccgcccattccggcggtatgaaatattatgaagaacgggggtatgtgcctgacggacggaaagacgttgaagggatgcatattaccggagcttccatgacattggaatatgcctatcaggattggtgtttggctcagatggcgaaaacaatgggaaaattacaggattatgagttttttatgaaacgatcaaagaattatcgtcacctttggaatccggagagtggctatatgcagcctcgtggaatagatggcgactggttgccttgttttgacccgttggagttgacggaaaaaggaggattctgcgagagtaattctgctatttattcacactatgttccgcacgatatgacaggactgatagaactttatggaggtgctgacaaatatattgaaagattgaatgcgaattttgaaaaaagtgaaccgtatggatttttccgttctaataaaacaaaggaaggaaattggacagactatggcaatcaaccggggactggaatggcccatttgtttaactatgcaggcgcaccttggcttactcagaaatgggtacgtaaggtcaaggccgcttatagtgatgtgaccccttatggaggttatcgggatgatgaggaccaggggcagatgggagcgttaggtgtcctgatggctatcggattgtttgaagtagatggcggctgtgcggaaaagcctttttatgagatcacgtctccactttttgataaggttactattcatttggacaaccgttattatcccggcaagacatttcaaattataacggtaggaaactcggctgataatatgtacattcagcgtgcttcctttaatggaaaaaagtggaataaatgttggttttatcatgaggattttattaaaggaggtactttggagttacaattaggaacaacacccaataaaaaatggggtatagaagaatttcctccttcctctgtgtcttcagataaagattgaaaatcggaatgaatcatcttgtggtttctaacgaaatcaacggagcttgtcatacctggacaccgataaagaatctgtgtacacataaaatagatgtaaacagattctttaccagtgttttaatgaagggctgtatgtattgcagtttgaatgctcttatcatttttatttgtgatactaacaggagggattaggccgatgaattgtaattgtattacggtgcaatttcaaatcgtccgtgcagtctgatatctgtagaagaggagccgatcattactttaaacttacccggttccacacggaaattcatattcttgtcccataatcctaaatcttgtggacgcaatctgaaatggactatttgctcttctccggcttccagactgatacgctcgaaaccacgtaggactttggtataggtagtgacgctgctgacttcatcccgcaaataaagttgtaccacttcatctccttttatttttcctgtattcttgattttacaacttatatttatatctccttgtactccttgacgtaatggcgagatcttcaaatcaccataactaaaagtcgtatagcttaaaccatggccgaaaggatagagtgctccataaacagatgtggaagaactttcatccgatcccggtttgaaaggaaaagcaaagggaatctgtcctacagattttgggaaagtcacggcaagccttcctcccggattataatctccgaacaaagcttctgccacggcttggccgcagaattccccagggaaccaggcgtgcagaatggcaggtacatgggctgctgcatagtttatggaagaagcgcgtccgtcgagcagcactaaaacgaccggttttccggttgcacagacagcttttaaaagttcttcctgccttccgggaagattaaggctggtccgtgaacgatcttctctgactgtcagttcgttgccgcctaataccatcactaccacttcggcttgtttggctgcatgaatggcttcctccattaatcgagcttcctctgttgttttcgggaaatcaagaacttcactttcaggaaaatgaggatctatgatatcacatccttttctataaatcacttctgtatggggcaatcgttcttttatgccttggtaaacggttttaataggcgcattggcagggccgtaccggcaaatcaactgggtccgttcatcggcattgggaccgataacagcgatagaacggagcgatttggataaaggaagcagattcatttcattttttaataatacaagtgactgacgggctgcttccaatgatacagcctgatgttccttgctatggacgatttgttccgcttgtttaccattaccccgatagggattgtcaaataatcccagccagaatttgacacgaagtatctcggctacccgtttgtcaagagtttcctgagagattttaccgtcggcaacagctttacgaagaggcaagataaaatcggcaggcggagtgaaatgggtacggatattcagtcctgcattgacagcctgcgctattccgtcttcgtatgtattcgccactttatgtttactggagataaattccacagcttcactgtccgatacgacatatcctttaaatccccattcctgacgtaatatttcagtcaggaaatgataacttcccgtaatgggctctccgtcatagtcattataagaactcatcactcccaatgctccggcttcttgaaatgccatccggaaaggttctatatataaggtacgcatttctcgtggagctacgtgtggatcagtccgcgtctttccgtcacgcccacctaccggaatgctataaactgcaaaatgctttggagtagccaccaggttatgtctttgcagactggtaatcatttgttttcccagttctcctactaaataaggatcttctccgtatgtttccacgcatcttccccagcgaggatcttgggcgatatcaaggataggagaatagatattggtataccccagcgctacagcttctttggcttccacttcaccgatacgggctatcagctctttattccaagtagcgccctgtccgcattgggcggggaaataagttgcccggtcatgacataatccgcgaataccttcattggtgaaatctacggggatgcctaaacgtgtttcttctacaaaccagcgttgaatggcatgcttggcatccacatgtttggtgtagggaaaagaatattcggacttgaaagttcccagtccgttatgttcttcatctatgttccctattccgtctttccatacctctgttttccaattgtcttggggcagggcatctttcagtacacgtcctgaaccatagagggtagccatctggcaacttttttcttccaatgtcatttgtgagagcaagtcttgtaccctctcttccagtggggctttaggattttcatatagatccatttttccattcttgttgaaatctatccatcctttgtgataaattccatccggcgtatctcctgatacttgtgtacaaaacaggaaagaggctactgtaaataaagtgtgtttattcatgttatctaggttttgtatatatgcttaatacgtacaaagatagaattttactcatctctccggaagatattcataactaaagttgagtgtttcttgattgtgattcgtctttgtaataaaagtgaagataactatgaaacatgtatttttatttggaatattcggttggttcttatcatttacgcttgtcgcacaaacaggaatctggcaatggtccgtacccgttcgtaattttagcactcatcccaagaatcctgagtcaagggcttacttgtggattcccagtcagtgtgaacaagtaaaagcaatcttggttgcccaacacaatatggaggaaatttctatccttgaagatgaggttttccggcagcgtatggctgaacttgatgttgctcaaatatgggtatgtccttctttcaatcacggatttgattttacggatggggcatgggaaactttggatggtcttttggcagatcttgctgaagaatctggatataaagagttgtctacagctcctttaatagctataggacattcggcagctgctagttggccttattatcttgcagcctataaaccggaacgtacattggcatgtatttctgtcagtggtcaatggccatatcatcgtgataagtggttatgtccagatatttggggtgagcgtaacatcaataaaatcccttgtctggaaaccatgggagaatatgaatcagcacatacatggagcaatgagggtttgaaagaacgtaaggaacatccattgctacctttaagtatgttggcctgtcctgctgaaggccactttgcctataccccggaaaaagcacaatatatagctctttatattaaaaaggcaatgcactatggacatgtggatccgacaaaggaaggatggttgatggagcgatggaaaaaaaatgaaaaaccttcttgtattccggcaccggtaaatcaatttaaaggtgatcctgcacaagctttttggttttttgatcgtgagatgatagaggctactttggcgtatcaatcccgatattacgatatgaagccacaattggtaagtgtgtctcaaaacggaaaaacagtatcccaacagaatactcatttacaagttcacccggcttttatgccacaggaagatggtatcacatttcaattgactcctgtttttctggatactgttccaggagaaagcccccgactttccaattggactgatttacctgtcggagcatctattggtcatgccggaaaatcccctgtcttgcagatgattaccggtccagctgttttagttgattctgtgacatttcgaattcaatggaatcggggaactttatggacggacaaaaaatcggatattgttttttcaataactcatccgggagataaagaatataaaccggctgttcagcaagctcagattacaattccggttaaaaatagggaaggacagccgcaacatattgaatttgcaacgttaccggacataaagcgtggtactaagtacgtttctttatctgctgtttccagttgtggcttgccggttgatttttatgtagaatcgggaccggcttatgtggatggtaatcgattgatattaactgctattcctcctaaggctgcttatccggtgaaagtgactgtgatagcctggcaatacggaaaaaactcatatccaaagataaagacagcagagccggtaaagcaaacattttatattcgttgactttaaataatgaattaaataggcggatcataaaataattcattcggattgagtggaatagctctatgatacgtatttttgtgaaagagaatgaatagaattatgaaaaagactattttattgatatgcttgctgataacaggtgtattatatgcacaagagaattttttgtcgataaaactgtcacaaggtcatccccgatatctgacggataacaagggcaaagccgaaacgcagaagttgataaaggaagaaccatgggcacaggaagtgtttgaaaagttaaagcaacggactgaccggtatgctgaccgagggcctgaatggcttacttcccgcttgcaaatgtattggaaaactcatgcaacggaggtatatattaaaggagaatattatgatcatgcaggaggagagaaggcgccggctcctacggtgatgtataccggtgcacgcagtcatgcaactaactatgtacgtcccaagctggaagatttgaagccttatcaggaagatgctcggggaatgtatctggcaaatgggacgttggaaggcagaccatacgaatgggtgaatatcagtaaaaccggaaatatcatccaaagtattaatgtagagatactgggtatcgcccgtgatgccgcttttctttggtggatgaccggagagaagaaatatgctgatttggcagcttcggtatttgatacttatatgacggggatctattaccgaaatcttcccaaggatttgaactatggacatcagcagactttggtgggtatgagtagttttgaagtcattcatgaggatgcagtgaatgctttggttccattgtatgattttttatatgattatttaaaaaccgataaggctgataagatggacatctatgccggagcattcaagaaatgggcggataatatcattgataatggagtgccgcataataactggaatctgatgcaggcgcgttatatcatgagcatcggcatgattttggaacctgatgcttcttatccggacaaaaagggaggcgaatattatattgattatgtgttgaatcgttcttccatccgtcaatggtcactgaagcagcttgctgattatggttatgatacagaaaccggtatttgggctgaatgtccggggtatagccaagtggttatcggagattatacggatatggttactatctttgaccgtaatttgggtatggacctgaccggagagattcccgtcataaaaaaagcggtggccgccgacccgcaatatttgtttccggattgtatgacaatgggctttggcgatacacatcccggtaaattgaatcctgctatctttgcccgtatggtaactaatgcgcaaaagcatggtaaaaaagatcaggaaaggcaatttactgctatgttgaagttatttgatcccgatgcgtccaaatcggcggctgaaaagaaaaacgtgaaggtggcggtaacttctttcttcagtgataagcctttggtgattgatgataagatacctgccggtgatatcaatgattatgtgactcctactttttatgctcccaatgccagttggctggtgcaacgcaatggcatggacaaacgccatagtctgatgatcgctcaaaacgccagtgaagggaaccacatgcatgccaatggcatcagcatggaactttatggaaaaggatatcgtctggcaccggacggcggcatcggcttgaccctttattccggtttggattatttggagtattacagtcagttccctgcacacaatacggtttgtgtagatggaatctcttcttatccggttatgaaaagcaatcatgctttcaaattattgaactgctatcccgaaacgggggtgaaagtggattatcagcctgtaagttatagcgaagtctttttccgtgaacctgaatcacaggctgatcaaaaccgtatgatgagtattgtgactacaggagaaaagaacggatattatgtcgatattttccgtagcaggaaagtggagggaggagataaaatgcatgattatttttatcataatatgggacaaaccatgaacttgactgctgctgacgggagtagcttgtttcttcaaccaacggaggaactggcttttgcaggggcacatatatatgcctattcttatttgtttgataagaaaagtgccgagacctccaaagatattaaaacaatgtttactatacagatgccggatgaggataatatcagtatgaatatgtggatgaaaggtgctcctgaacgtaaagtgttctcggctttgagcccgatgactgaagggttgagccggattccggatatgccttatgctatcaaagagcaacctacgttgacttttgtagcccgccaacaaggtgaagcttggaatcgtccgtttgtagctgtttatgaaccttcttctgtaaaggagccgggatgtatttcctccgttacttttccagaagtggaaagtggtgtggctggaagtcatgtcggaatttgtatccaacaaaaagaggggcgtgtggaccggattatttcttcggatgatgcaggccatttgtgtaaaagtggagaaatgactgtacaagcagcttatgcattgtggggaaataaacaaggcgatgattatattttctttttgggaggaggtacactattgaaaactccacatgttgaaataagttcattgacagtaacagatgtgatgttggtgtataaagagggcgtttggaaatatgcagcttctacaccttgtaaagtcaggatgaatggaaaagaatataatttgttgcccggacatgatttacgcaaactttgatataaactttcttttataaagtaatctttttaaatcatcatcctttctttttcatacagcaaataagaagtggatgatgattttttctttttttgatagggaaaatatattcccttttcactatatttgcattatttgataaacacgaggttccaaatatgcacaatgtaatgaaaaacattttaagatttatatttatattgtttcttatattcttgtctttacccattttctctcgttcctacgcttttcgtggcttgtctgtaactgagggtttgtcagatttagtggtaaacgccatttataaagattctttaggttatgtttggttggggaccggcaattcgttggaatgttttgatggaattcatttcaagcattatcttattccgggttcagatgaaaaattgaaacgggtaaatgccattgctgagatgcctggcaatgaattgtggatggggaatggcagtggattatggcgtgttagcaagcagaaaaatagtttggagcccattgcccgtgaaacgataggatatgctgtgcgctctcttttacatgacgggaaaggaatactttatatcggaacagaaagaggacttttcatttataaaggagggagcctgaaccaaattatgatagatcctaatatgttgtcggcggcgaattcgattggtggtttgaatttgggggaagatggaatactttggatggctacggagaatggtctttattccttacaactctcagatggaaaaatagaggcttatcataatgtggtggaagagaaacatgtttgttcctttaagaatatagcccggatagggagtatgctttatttgggaacgatgggacagggaatcatcagttttgatacacaaactaaagaatttgcccgttttgttgatgtaggttgtaatgtcatttcttctttgtccggtgatggcaaaagccttttgtatgtagggacggatggtaacggagttcattttgtatcaacggataaaaagaaagttgttcgttccatgcgtcatgaaacagggaaggatgagactttgcgttctaattccgtttattctgttttggttgataaggaaggattgatatgggtaggattctatcagctgggattggattacacattatatcagagcgggttgttctccacttatacgtatgctcctttttttgattccggagatatgccggtacgtgcacttgccatcgaggggaaggaaaagctgatcggatctcgtgacggacttttttatattgacgaagaaaatcatcgttataaaagtttcaaggttccacagttacgctcaaatatgattttcagttgtctgtattatcagaatgagtattatataggtacatacggtgggggaatgtatgttttcaatcctgtaactttgacactcagagattttgcccccgatggaggaatgcctttcagtaaaggacatattttctgtatcaagcaggataatgaaagtaatttgtggatagggacatctttaggaatattctgctataaaaatggcagacagatagctcattataccagtgccaactctaagttgccggaagggaatgtatatgaaatttattttgattccacccataaaggatggatatgtacggagaatggaatgtgtatttgggacccttccgtccggacattaaaaaccgatgtgtttcctgaaggatttattcataaggaaaaagtaagagtgatctacgaagattccgaccatgatctttatttttttccggacaaaggctcgctttttatctctgatttatcaatgactactttcagacgtttgcagccggggactcctctggatgggaatgatggtatgtttgttgtggaggatcgtgaaaagtggttatggctgggaactaacaatggtttgttccggtatgataagaaagactgttttattccttataattttgtcgatggcattcccagttccatatttactctttgtccgccggtgcgtgatgagaatggcatttggtttggaaactccaaagggctcttatatttggatgcagtgcggatgaatcagaagaaatccattccctatccggttgccataacagaggtatgtgtaaatggaaaatctgtagtgcaatctgttgtgagagatggcggcaagagtgaaatttcattggagtcttctcaaaagaatgttaccttttacttttccgatttcagttatacggcacctgcctttatgtcatatgaatatcagttggagggtgaggatgccggatggatagctgtgacaggtcgttcggatatgacttattatgatttgccgtccggtacctatacttttaaagtaaggcggacggggaatccagagtcggaaactcagatgacggttaaaatcgcttcttctatcagtatatggagcatagtgtttatcgtgatagcagtggtgaccggaggtattgctgttcttttgtcaaagaagaaagagggagaggacgaaagggaagaaccaatgcctggtcctgctaaggttatagaaaaggaaatacaatcggttaaggaaaccaatgttgtagcggaagaaaagtataagacaaataagataagtgtggaagaatgtaaacggttggcggataaattggagattgttatgcataaagaaaagccttataccaatcctaatttgaagattgccgatttggccgcctctatcggaacctcatctcatactttgtcctatttatttaatcagtatttaaaccgtaattattatgattatattaatgattatcgtatagctgaattcaagcgcttggtggagaaagatgaatatgctaaatacactttgagtgctttggcagagttgtgcggattcagttcacgggcttctttcttccgatatttcaaaaaagcgacaaatatcactcccaatgagtacatccgaagtattgggaaaaacaatgaataacctcgctatttcttgttgagagtatcaaattattatatgatactgatagtctcaaattcttaagctgctataaattagcagcttaaactgttttttgtctagggtaatgatatgagatttattggaaccggaaaagtgcttttcttgttcttctaccttctatatttgcattcgtaaatgtaacccaaaaagctgaagacatgaaaaacatatccatgaaatctattcaattaataaaagactcttatacgaattatcatcattcggtctatctgtatctttattataagataggtcataaagaagaggcagaagacttggcacaagatgtgtatgtacggctgatggattacgatcggatgctctgtgcagaaactattaagtatttcatttttaccattgcccgtaatttggtgactgactatttacgtcgttattataagaggcaggaagtgacttcttatttatatgagcatgcggtaacttatacaaatgagactgaggctcgtgtggtggctgatgacttggaagcatgtgagaaatatagattgtctttgcttcctccacagcgtcgtactatttatgcaatgagtcgttttgaagacaaatctatttcagatatttcagaggaattaaatctttcgcatcgtaccgttgaaaaccatttaaggatagggcggcatgaggtgcgcgagtttatcaaacagtgtatataataagaaaacaacaataaaactgttaatattaaatttcaagtttatgaaaaacgaattctttaaattttcatcgagaagaatcttgttttctacggtgatggcttctgccttgttggcaggtagcccgcagactgtatttgcagaggtgaatggggtgcagactgttatgcagactggaacggtaaaagggcaagtggtggatgccaatggggaacccattattggtgccagtgtgttggtaaaaggtactaccaatggtacgattactgattttgatggtaactttacattgaacaatgcttcaaaaggtattttggtagtgtcttatatcggttataaaacacaggaagttccagtaaatgaaaagaaccttatgaagattattttaaaggaagatacggaagtattggacgaagtggttgtggtaggttatggcacacagaaaaaggctactcttactggtgcggtagcttcggtaagtggagacattttggaaagccgcccagtgtctaatacagcgattggtttacagggacaagtgccgggtctgactattacacgaacttctgctcgtccaggaaatgaggatatggctattcagattcgtggtgcttcttctaccaataaagtggaaccgttaattattattgatggagttccggctattagcaatactgaatttagttcattgaatccgaatgatattgaaagtgtttctgttttgaaagatgcttcagcagctatttatggagcacgtgcagcaggtggtgttgtgttagtgacgactaaaaaaggcaaaaaaggtgataaactgaaagtatcttataatggtatggtaacagctaatacacctgctaatatgttacctttggcaggtatgagagattgggcttcagctatggcggaagcttcttatcaggattatgtagaatccgatggtaaaggaggggaggtaatcacacagcgttatacaaatgggcaactgtggaataatatcttagtatcaggtggaaaaacaccacatgcaggagttagttttgatgatacaaatttgctggttttagataaaatggcgattggagatccctttacttatgtagatgccaatagtcagatgcattattatgagtctaataactggttggatttaatttatggaacaacttggagtacacaacataatgtcaatgttcagggatctagtgaaaaagctcggtggatggcatcattaggttatgctaatgaccgttctgtgattactgctacggatgatggagctaagaagtataacgctcgtttgaatgctgattatgatttaactaaatggttgacatttaatattaatatgtcatatagtaatcgctatacggatgggccgattgatggacttgatggtaataattctggtatgtatgatgctcctatagcagctccttatactccttcaggtaattattatgatttatatatgataggtcgttctccgttgtcggcaatgcaggctggtggacgaaaccaacaggagtttgaaacatttcgttattctaatactttgacagctcaacttactaaagatttaaaggctacaggggctatgtcttttattaaaaataataatattcagacggaatataagacaacctattatgtaggggctccttatgtggtgggaggtacggcagaaaccggatatgatatagaggaaaaactgaatgctgttaatccaggaacctccagctatgtacaggaacgtagtcaacgtactttctatgagaattattctattcagttggattataatcatacgttcggagaagtacataatgtagctgtcatggtaggagcgaacgcggagaaaagaacttataagaatgtaaaggcaaaacgtacggaattattgtatgatggtttacatgatttgaacactgggtcggcagaagcttctcatcaaactatagagggaggatctaatgaacaaggatatgtttcgtatttggcacgtttgaattatgattatgcgggaaagtatatgattgaagcattggggcgtcgtgacgggacttctaaatttcatcctgattatcgttggtgtaattttggtgctgccagtatcggctggagaatttcggaagaaagctttataaaagataatttgaaatggctggataatttaaaactgcgtgcttcttttggcattaccggtggtgcagtgagtgaattaggcaattatgactatttgtcaagtattgctttgggtactacttatttcaataccggacttgttcaaagtgcatggctttccaaactaacagattatacacgtacatgggagaaattagagaatcttaatatcggtgttgatttcgctttattaggcaatcgtttgaccggtagctttgattggtatcagaagaagaacaataatatgttagtttctttaaattatccggatgtgttgggaacaaatccggctgcaaccaatgatgctaagcttcgggttagaggttgggaggtagcattgggttggaacgatcgtgcaggtgatgtaaactattgggtaaatgcttctttggcagattctcgttctatggtgcttgactatgcgggaaccgacagatggacagcaggtttggtgaaagtacgtgaaggctatcctttgaattcattgttcgtatataaaactgaaggcttttttgcttcgtatgaagaaattgaaaaatattatgaacagtataaagggaacagtgccttgtcaggtgtagcacaaactagtacaaatacacatcttcgccctggtgatcgtaaaaaaatccttcttcttgatccggctaatgatactactggtggaaaaggaaatactggagctggtgatgtgtatcattatggtgatattgatcctcattttacctttgggcttaatgccggtgctaagtggaagaatattgatttttctttatttgtacaaggagtaggtcaacgttatttcttgcgtgaaggtggtttaaacacttgtgctttttacgctaactacaacaatattttgacaactcaactggatacatggacttgggataatcaaaatgctgagtatgcccgtctttctttacagggtggaaaaaataaatggaatgtggacaataatgacgcttctgttcaaaacgcatggtatgctcgtctgaaaaatgttactgttggttataccattccctccactatcactgataaatggaaaatagagaaattaagattttatttctcaggtgataatatagcggagataacaggattatctgatggatttgatccggaaaaagggtatacggcttctaatactagaactagtcttcctttcagccgtagctggacaattggtgttgatttgacattttaataaatgaatttaaaaaaagaaaaatatgaaaaagattttatttgcagcaagtgcaattgctatagctatgggaatggcttcttgttcggattattttttggatttgaatcccacagaccagcaaaccgaagccaatttctataaaactcctgaagaatttgaggcggcagccaatagtacatatagtttttatggttttggtgatgtgtctgaaacggtcaatggtactaagtataccagttcatattatgatatgcttgatgtgaactctgatattttagctggaataaatcctgttgcccaaggtatattagcaccttccacaaatgatacttattggtctctgtgttatgcgaagatacggaaatgtaatgtggttatagaaaaaggagaggagtatactggtacagggagcatcaacgcttcgttggctgtagctcgtttcttccgtgcatatcaatatttttggttgttacagcgttttggaggtgtacctgtcataacaaaggggcttacttcaacttctgaagaattgtatgctccacgtaattcacgttatgaagtagctaaacaaatttttgatgatttggattatgctattcaatatttgccggacgaatcggcttatgatggaaaaataagcaaacaaggagcgcaagcgttcaaagcacgtacgctgttgtttgaggctacgtgggagaagtatgtgggaactactacggatggtgatggaactacttcaggagcaggtagcgataagcccgtgggatatcctgatatacaaagtatgttaacagaagcggcttcattagcggatgctgtaatgtcttctggtaaatatcaattgtggaatgcggaaggaactatatatgagggtatagcctataattatttgtttaatctggaagatgaaaacacgaatcctatgggatttactaaagataaaaatcatgagtttattcttcagatcgcttataaccatacaagtaaacgcattggtaaaaatataaccaaggctacaggtggtgacaataataatacaggagctgttacgattaaaatggtaaatatgtttccttgcgtaacagatggcttgccttatttctattctaaggattataaaggatataacaagatgactgatatttatacctgtcgggatactcgttttacttcttgtattaaaataccgggaactacttattattggatgggagcgaatggggctgataagagtctttatcttaaggctaactatgtgaccacttttgattttccttcaggctgttcggtatattatcctctagtacaaaattcaggacaaactggtttccaaaaccgtaaaatgtgttcggaacgaaaagattataaagatacggatgaaggttataattatccggtgctccgtttggcagaagtatacttgatttatgcagaagctaaatgtgaattgggagatgggcggatttctgattctgatttagataaatcaatcaatcttttacatgatcgtggtggttcggctcgtatcagtaatgcttctgttgcacaagcgaatgctaattaccaagcaaatacaggtaagtctggaaatctgaccatgttggatttgattcgtaatgaaagggcggtagaactacgtaatgagaatcttcgcccgacagacttgcttcgttggggtattgcagaagaagctttaaatgctgaccggtcaggaattgtagtaaagaatccggatggaaatgatacagagtttgccggttttggttatgaggtagcaggaaaagtggaaaaaatatgggatggggtggctatttacggttatgaaacattggatgatgggtctcaggcattgatcattaatagtaaatcccaatttaatatgcaacgtaagcattatctctatcctttgcctttagcgcagattcaattgaatcctgctttattacagaaccctggatattaatgctggtaagggaagaacatggttgaagtggctatgttcttcttttgtgctgcaatagtaatattttacttttgaaatgagcagtaggcaattatattctagtgacagggtgctagctttatttactgtaaaaatgaacattctgaaatgacagttggtaaacctcttactgtaaaaaaagcgacaagtggcggatatatgggcgtttttgctccgtttgattaattgttttatctttatagaaaatttaagttgattgatatgaggagagttattttatttttcagtttgttgttggcaacgggggtgtcggcacagcactttcagatatcttcaccggacggtagaatacaaatggaagtatgcaatgagaaaacattgagttattcagttgtttacaagaataaagtcttggtggctgattcaccacttggctttgagttcaaggatgaaaaaccgatgcaaggcaattttgcattactgaatgttcctcaagctgaagctagatctgaatcttggattccggtagtgaagaataaacatgaggaagttcagttgcattggaatgaaatgacttttaacttggaagagaaggagggaaatcgtcgtcggatggattttgtggttcgcgtatatgatgaaggggtggctttccgttatcaactgtatggtggaagaaaaattggaaaccgacagataactaaagaattgacagggttctcattaccggcggatgcaactggatgggcagcgaagtacaaacgaaattatacttccagccaggaatcggagttcgtgaagactacgttgaactatctgcctgcagacactgtggcaggtcttcctttcttggtggaggtggacaaacaaaactatgtggctatcaccgaagcttgcattgatgattatcctggattttacataggaaaaggtaacagtgcgcaggaaggaaatcaagtattggctaccagactttctccattgcccggagagaaggaagatggagtgaaagctcgcttctttgagaaaatggctacgccttggcgtgttattttggtaggagatcatcctggatagttcatcgaaacagagcttattcatggtttgaatcctccttgcgccattgaagatacatcttggataaaaccgggtatgtgtgcttgggatcattggtggagcggtgaagtaaagatggaaatggatgtaataaaggaatatattgattttgcagaggagcagggttggccgtatatgttgatagattggcaatggtacggtccttacaacaaggctcatgtagacatcaccaaacctgcacctcagttgaatatgccggagatattggagtatgctcgttctaaaaacgtgcgttgctggctatggctctattgtacggacgtgaacaaaaatgatagttacaaagaagcatttgccttgtatgaaaagtggggaatagccggtataaagatagactttatggatcgtgacgaccaagaaatggtaaattggtatcatcgtatcataaaggaagcggcaaagcataagctcatggtgaattttcatggtgcatacaagccagacggcattgggcgtacttatcccaatctgctgacccgtgaaggtgttatgggaggagaatattctaagttttctaaaagagtgacaccggaacacaatgttacattagctttcacacgtatgttggccggtccgatggattatacgcccggaggttttctaaatgtatctatggaagggttcaaaccgaagaatccaactacggtacctaattcacgatgtgccgagctttctaagtttgtgatttatgatagcccgttaacggttatgtgcgaacatcctaaatatgttttaggtcagccgggggctgattttctgaaaatagtgccaactgtatgggatgacactcgtttccttgatggctatccgggagaatatattgtgatgaccaagcgttcgggcaaacagtggtttataggtgcaatgaataattgcatgaagcgtgttgtggaaatcgaaacctcttttttgccagcaggcgagtatgagtttgagtattgggctgatgcaaagaatgctgataaaaagccgacagaagtattgaaaaagaaggtgcgtttcgttgccgggaagtctttgtcaataaagatggtttctggtggtggttatgttggagtttttactccggtaaaataagatcttatacaaaacagctatgaaaataaaagtattcttcattgctgtttttttaggctattgtgaattcaaataaatataaacatgaaaaataaacttttgctattgttttttctattgggagtgtttttcccgttgtctgcacaagaaagtgaagttttaatatcgacttctcatacctctttattgctttccacttcgcaaggaggagaattgaaatttttgtactatggtagaaaacttactgatgctgatgtacatgctattgttagtacagagtctggaagtttttccgcttatccagtctacggactgaattgtccttctgagtctgctttgtctgtgcagcatgaggatggaaacatgacgcttcaaatggaagtcattggcgtggaaactactcatcaggaaaaagcaaatttaacagttatatctctaaaagacaaagtatatcctttttatgtaaaactctgctataaagcctatcaggatgtggacgtcattgaggcgtggacggaaatcagccataaggagaaaaagaacgtgaagctgaaccagtttgcatctgcctatcttcccgttcgtaagggcaatgtctggctatccagtctctacggtgcttgggcaaacgaggcgcgtctggtgcaggaaccgctggaaccgggtatgaaagtgataaagaataaggacggagtgcgcaattcgcacacggcacacgccgaagtgatgttctcgttggacggacagccacgtgagaatagcggacgtgtgattggtgctgccctttgttacggaggtaattataaactgcgcattgacacagatgaaagcgaataccatcatttttatgcaggtatcaacgaagacaactccgtttatcatctgaaaagcggtgaggtattcaagactcccgaactggcattgacctatagtgacgaaggattgagtggtggtagtcgtaactttcatcgctgggcaagaacgtataaactagctaatggcgacaagctccgaaagattctgctgaacagttgggaaggtgtctatttcaaaatcaacgaaagcggtatgaagcagatgatggcggatatttcttctatgggcggtgaactttttgtgatggacgacggctggtttggtgacaaatatcctcgcaagaccgaccgcacttcgctgggtgactggatggtggataaggagaaactgccttcgggtgttggagggctgatagatgtggctaagcggcagggtatcaagtttggcatctggatagagccggaaatggcgaacactcaaagtgaattgtatgaaaagcatccggattgggtgatcaaagcaccggaacgcgacttggtactgggacggggaggtactcaggtggtactcgacctaggtaatccgcaggtacaggatttcgtgttcaacgtagtggacgaactgatgactaactatcccgaaatagattacatcaaatgggatgccaatatgtctatcttgaatcatggttccaactatctgggcaaggatgaacagagccatttatatatagcttatcatcgtggactggaaaatgtctgcaagcgaatccggatgaaatatcccgaactgacgatgcaggcatgtgccagtggtggtggacgtgtcaattatggacttttgccttactttgacgagttttggacaagcgacgatacggatgctttgcaacgcatctatatgcagtggggcacttcctatttctttccagccatcggtatggcgtcacatatcagtgctgcacccaatcatcagactttccgtaccatcccgttgaagtatcgtattgacgtggcgatgagcggacgtttaggcatggagatacaacccaagaacatgacggatgatgagaaagaactgtgtcgtaaagcgattgccgagtacaaggaaattcgtccggtggttcagatgggggacatataccgcttgctttctccttacgacaagttgggggcagcttccttgatgtacgtttcgccggaaaaagacaaggcggtattctattggtggaagctggagcactttatgaaccaacacttgccacgggtagtcatggcggggttgaattctgaaagccgttatcgtatccgtgagttgaaccgtatagataaatatccgcttagttttgaaggacaagtgttcagcggtgcttatttgatggcgaacggtttggaaataccttacaatcataatgtggacaagccgcaaaagaacgaatactcaagtagagtgctttatttggaggaagtggataaataacaaactatcggaaaagttacggattgtaacagatgaacataaaagagtcgtatcaaattctatttttaagtaatgatatgactctttttattgtacaatgaatgttgtcaaattttagattcaaagattatttcctttgagattgaatgttgatgcattcattttttttattatcttctatgctgttgagtgtctcatgtctcataaacgtattataattaaaatcgacttttatgatgaatataaaacaacttttatcagcttgtatattgggaacagcaatagcttcatgcagttttccatcgacagaacgggaagggattgttattaaccttcaggagaaaggtgccgagatagctctttcaatgtatggtgtcttttttgaagagattaatcatgccggtgatggaggattatatgccgagttggttcagaaccgtagtttcgaggaacatgagatgccggcagggtatcatgtggaaggagataaactgattcccagtccggagaaatatcacttgaccggagaagtacgtcacgatcgttcattcaagtggaatacagaacctgtacgtgcttggaatttgctggtgaaggatactgcggctgcccggatgaggcttactaaagagcgtccgaaatttcagtcagctcctaataatttggagataacactaacggatgcttcacaccctattcaattggtgaatgaaggatactggggaatggggatcggtgccggtgaaaactatcatctgcgtgttattattcgcacttcgtccgattataaaggaacggttgcagccaaattactttcttcgaaaggagatgtgctggcggaaacttctctcaaagtgaagaatgacaacacttggaatgatataaaagctacattgttgtctgctgcaaaagatgccaaggcaaagctagctttggaatttgatgctcccggtaagatttggatagattatgtttctctttttccggaaaagactttcaataatcgcccgaatggcttgcgtaaagacgtggccgagatgttggtaggattgaaacctgcattcttccgctggcctggaggatgtgtggtagagggaattactttgaataaccgctttgaatggaaaaaaacattaggagatccggctgcacgccccggagagtatagtacgtggggataccgttgctcgtatggtttcggatattatgaaatgttgcagttttgtgaagatataggcgcaaaagccatgtttgtatgtaatgtaggtttagggtgtcagttccgtatgggcgatgcttgtcctgacgacaaaatatcctattatttggacgattgtatggatgccattgaatacgcattgggtgatgtgactacggaatggggaaaacgccgtgcggcagatggtcatgccgaaccttttccgttgcaatatgtggagattggtaatgaaaactggggaccggaatacgatcgtcgttttgatctgttctataaggccattaaggagaagtatccgcagttgacattgatttataatgaaatgccacaacgtgatggggctcctgcaatagctaaaacggatatgattgatccacattggtatgtcgatccgtattttttctttcgtaacacaactttgttcgatacttatgaacggggaaaatatacggtttatgtaggggaatatgcctgtaaccggggagttggtggaggaaatatgctgggagctttgtctgaagctgcgtttatcggtggtatggaacgaaatggcgatttggttacaatggcttcgtatgcacctttatttgaaaatcggcatgataggaactgggctaccaacttgatttggattgattctgaccaggtaatgggacgtagctcatattatgtacaaaagatggcggcggagaaccgacctgattacaatgtaaaaagcaacatcacgatgcatgaagcccaacccgaatctgtgggtaagggacatctgggtttgggggcttctttggcatctgtagagtttaaggatgtaaaagtgatacaaaacggagtgacggatctgcttggcgatatgattctatcaaaagaaaaccgcatgttaccggaaaaagtctatgaaggggactatacgctggagtttaaagtaaggaaaacagaaggtgaacaaggatttcaaatttttttaggtatgagtgaggatggtaagaccggatatagatataatataggtatgtggagcagtaatgaccgggcggaacttatccggttggagaaggggaaagataaaggcgtgctgtcggaacattccggcaaaaaaattgaaaaggacaggtggtatgaagtgaaagtggtagtatcctccatgaaaaatgaatgttatctggataatgaacttgtcttgtcctctgtaccccaagccatgccgttacagtttgttgcttccggttatgatgaagaaaaaggagaattggtgattaaagttgttaatggggctgatacggcttatttgaccacgattcagataaaaggatcgaaaaacatagcagaggagggaagggtcatttctttgactgcggccgacggcagcgaggaaaattccttcgaagaaccccgaaagatttatccgaaggagattgcatacaaaggattcggacctgaatttgattatgaatttccacccttctcatatacgattttgcgtgtaaaagcagaaaaacaataagaaaacgaacgattaatttgatattttatgaaaaagattatttcattattatttgtggcaggggtgttgaacaccgttgctgcacagaaaataacgatgtattccaccactgcatccgagcgttggacttctcagaaagtaacagttttgaagcatgcctcgcagactccggaggtatctgtctatatggatagtcttttacagcatgttaccggctttggcggcacgtttaatgaaataggctggaatgcgcttcaaagtctctcaggaagaacgtgataaagtgatggcttccttgtttgtcgaagagggagtacgcttttcattgggacgtactcctgttgcttgtagtgattattcatttggttattattcttataatgatgtgaaagatgattataccatgcgtaatttcagtattgaccgtgatcgttttatactgattccttacataaaggaggctttgaagctacgtcccgatttgaagatgtgggcttctccttggactccgccggcatggatgaaagtcaacgagcattattcacagaaaagttccggcattgagggcaccgatatcgggcacaaccgtcttgatcctgcccgtaatgtattgggaaatgttacgggattcaagatgcagcaaggatatttgcaggcatacgcgctttatttctccaaatatgtgcaggcttataaaaaaaacgggattactatttcgatgctcatgcctcaaaatgaaatagcatggacaccttgctggccttcgtgtacgtggagagcagaggacttggctattttcgtgacccaatatctgggacctcaatttaaaaaagattcgctggatacggagatatggatgggaacagtcaattatccgaaccccgattacatccgcacttttctgaatcagaaaaatgtatcggattatgtgagaggagtgggagtgcaatggacaggtatgaaagcgcttcctgtcattcacaaggaatacccttcgtatggatatatgcagacagagaatatgtgtggtaattcggagaatgactggtcggcattggagcgtacttggaatgcggtagtccattgtttcaataatggtgtgggggcttatatgtattggaatatggtgctcgatgaaacttgtaagagttggtgggactgggcacaaaatgcaatggttattgtagatcgtaatacacgccaggtacgttatactgatgaatattatctgatgaagcatctgtctcattttgtacaaccgggcagccgtttgttgaaagtgtcagaccatgagaatgtgcttgcctttcgtactactgacaatggaacggctatagttacttataatcccgatgaagacacgcgtttccgtacttttgtcatagatggtaagaagatagaggtgacattgaaacccaaatcgatcaatacaataaaaatgaatgataaatgaaattaaaagaattgttgttggttgtccatttattagttggattccattttattcttcatgcacagaatcatctggttgtttacccggctcctgatgaggtcgatttaaaaaaggattttacagttaaagtccgcgaagtgggaaaagagtggcaatgggtggacgtttatccggtgaaagtagatgaagtacgccagacgaagcatcatgttgaactggcctcaatgggatattttgacttttccggtcaggtggaagtttccgttacctataataaaggagaagtaaagagtggcagggtgcgtccgttgtcgtatggtatcactccgaggatcagcggcagtacgatgacttttacactagaccgtccgcgtaatctgtccattgaagtaaatggagacatcttccataatcttcatctttttgcgaatccgatagatgaaaaccgcccgaagaaattgaaagacaagaatttgatttatttcgctccgggaatacatcagttacccggcgatacactcaatgttccttcgggaaagacggtctatgtggcaggtggggccattgtgcgtggatgtatccgtgcggtcaatgcccgtgatgtgaaaattctgggacggggtgaggtgcatcccgaaggtcgtggggcaggtatcagcattattaattcacgaaatatatatgtggaaggtctcatcacaacccaatgtcccactggaggttcggacagtgtgacaatccgcaatgtaaaggccatcagttcatacgggtggggggacggtatgaatgtgtttgccagcaacaacgtcttgtttgacggagtattttgccgtaactccgatgattgcactaccgtgtatgctacacgtatggggtttcatggcggatgccgtaatgtaacaatgcagaattctaccctgtgggcagatgtggcgcatcctatttttatcgggttgcatggagatgtggaaagaaatgaagtgatggagaatctgacttaccggaacattgatattttggatcatcgggaaatgcaggtggattatcaaggctgcctggctatcaatgcaggtgataataatctggtccggaatgtgcggttcgagaatatccgtatcgagaatttcaggcaaggacaattggtgaatctgcgtatattttacaacaagaagtattgcaaggctccgggcaggggcattgagaatgtgctttttaaagatattacctataatggcgatcatgccgaactctcacatattgttggctatgacaaggaacggatggtgaagaatattcgttttgagaatctgaagataaacggtaaagttatatcggatgatatgaccggtaagcctgcatggtataaaacgtcggacatggcgcgtttctttgttggggaacatgtaggtgatattgtatttgtaaaatgaaaaaaggtagtctcaagcaagagcttcaagaagatttaaaactctgtggtcggtgttttttagagagagcatataaaagaaatcatctttgcgaaataaaaagaaaagcctcaaatccgcaactacgcgcctaatatgatacagaagcgaaaagaatctgcatcgttagtaaaaagggggcacagtgcatcgaatgtcaccataaagacatataaatgccccttaccccaccatgcgacttgaggcaatacgcaaaatcacgactataagttgtcggtgttatccaaagtcattctggaacacattggcataagcattgttgcatgaatagatattcagcacatacttccttgatgtcctgacccatttggctggcacagagatgaacttaaagacaaacgtcttgatgcggcttgttgctttgagtccgaacctcttcacgtcaagcctcgccatgatgaatttatagaagttgcgtatgagtgccataagcagaagaaacaccgtgttttctcccataaaggattttggaagcctgttccagccgaatccgttattcatatcatcgaagatgcgttccttccctccacggaggttatagaattcgacaatctctttctcggaagactcgtagtcatttgtaaggatgcagcggtaggtgtattctccttcccacaggtcgagttcgccgtctatccgcttctgtctttgaatcacaagacggtatgccttccctttccatttctcgatgagaatggaggccagctcaaactcaatgccgcccaattccactttcttccaacctctgagggcaaagatgtcattgtagagcgaactgcatcggttagcacggatatagaaggtcttgcagtgtttagcaatctcttccactatctcttcagaacacgagccgcaatcagctctgaaacggttgataataagcttgttttgttcaaacctttcaaagaacctcttcagcgtgtccttctggtggaaacggacatttgtgttgccgtcgctgttctcaatgccgacaatcaagttgccaataaccgccacgccagggcgataaccaaggaacttcttgtatgtaggcttcgcatcaaacttctcagcctctatgaactggtggtcgaagtcaacgtcatacccctcgccctctttcagctgccctgtggacaataggcaattgaggagcagtgtattcagcttgtctgccgtgttgaagtcgtaggtcttgccagtgtcggatgtgtaggaaatgttatcctgggtcagttcctttatggctctaagaatcgtgtcggcactgcatgtgcgaagtgtcggatgaagcgaaaggtggtacatcagatgagtggtgacatcctcgatgcatgagccgccacaaaaataaacgctcataagcgaacggatgatttcgctgtattgataaccatacagcctgcatctcataccgagggttgagtcgattacagatgagagtctggagtcaaattgctccattattgaaaatattcctccaaaaggagtgagtttctcggatttaattgctacctttgccatgtctgtcgggtttgatacatattttgatttgcaacactaagataggtgaaaaatctgacatggcaaattcctgagcaactttttgttgctcaggtacttaaaaagttatatttgtaatagtgttgcggaattaaggaaaaggtaattatttaggtaggataatttttaaagaatgatcctttttgctatctttgtccattgaaaatgaataaattatattcttatggaattacaagataaatatatccgttttgattgggctgttaagcgtctgctgcgtcataaagctaattttggtgtgctcgaaggattccttacggtactgataggtgatgaaattcatatagtggagattttggaaagcgagggtaaccagcaaacggagaatgataagttcaatcgggttgatatcaaagctctcaatagtaaaaatgagattgttatcatcgagattcaaaatacgcgtgagctgtattattgggagcgtatcctgtatggagtggctaaagccattacagaacatatctcattgggcgagacttattataaagttaaaaagatatattctatcagcattctttatttcgatattggtcatggaactgattatctttatcatgggcagaatatatttaaaggagtgcatacaggagacttccttcaagtgagtactcgggaaaaggatgccattgtgccccgtatgccttccgaaatttatccggagtattttctgatccgtgtgaatgagtttaacaaggtggcggtgacccctttagaggaatggatagaatatttgaagacgggtattatccgtcctgacacgactgctcccggattgggtgaggcacgtgaaaaattgaaatattattcaatgacgcctcaggaacgccatgcctatgatgaacatcttagcgctttgatgatccagaatgatgttcttgattctgctaagttggagggaaagatagagggacgattagaaggacgtgcggagggtcgtgaagaaggtcatgaagagggcattaaagaaggtgttcttcgaaatgcccggagaatgaaagaaaaaggattctctacagaagatattatggaaattacaggattgacattcgaagaggttagtcagttgtaatcccatgtttggttaaataaatccacaggtatcctcatgaggtatctgtggatttttattttaatgaatgaggtgttgagtgaatatcgtgagtggagcgtattaaaaagaaaatattcatttaaacatatagcttgatgaggaaattagtatttgctttattgttattgtgcagtgctttgtttgctactgcccaagaatggcaatggtccgtacagttgaaaggattcatctcttccgaaaccggcaaagaaccgactgccttcctgtggataccttccgattgccatcagttgcgtgccgtaatggtaggaaagcacaatatgagtgaggaaaccctgttcgagatgccgcgtttccgggaagcattgtcccggatgggaatcggactggtatggatcactcccggaatcgaccagcaatgggatgtgacaaaaggaacgcaagagattttcaatcggatgatgaatgacctggcggaagtcagcggctattctgagttggaacatatacctgtagttcctgtcggtcattcggcaatggccacttatccgtggaattttgccgcttggaatcctgaacggacattggctgtcatttctttgcatggagatgctccccgtaccaacctgtgtggctatggcggggagaatctggagtggggtaggacacgtaatatagatggtattccgggattgatgattgaaggagaatatgaatggtgggaggcgcgggtgaaccctgctttggcgtttcggatgatgtatcccgaaagttgtatttcatttttgtgtgatacgggacgtggacattttgatgtggccgggcagactgccgattatattgctttgtttctgcgaaaagcgttggaataccgtttgtccggacatccttctttgaatgagcctgtccgtttgaaaaaactgaatccgaaagaagggtggttggccgagcgttggcgtccggagcagaaggacagggctaaggcggctccttatcgggactataaaggagataagcacgatgcattttggtattttgataaagaaatggccggactgaccgaagcccgctatgcaaaatataaaggtaagcagatgcaatatcttggatttatgcagagaggccggttggttaaatatgatgccggacaacatgccggagtgattgccgctttccggccggaggccgatggcctgacttttcacgtaaaaggggtgtatacggactctttacgctcctcactgataaaggaacatgctcatggcggaattgaagttactcgtatttgcggtccggtggcaaaggtgaatgatactacttttaccgtgcgtttttatagaatgggaatggataatccgaagcgtaccggagatatctggctgttggccgctaatgagggtgacagtagatataagagtgcggtacaacaattcaatattcgtattccttatcggaatacagagggaaaacgccaatatatactttttccggggatagaagatgtgagggaaggagtggaatcagtttctcttgaagctgtttctgattgtggattgcccatatattattatgtaaaggaaggccctgcggaattacaagataacaggctggtctttacgaaaattcctccccgcagtaaatttccggtgaaagtcaccgttgtagcctggcagtacgggattgccggacaggtacagacggctgaaccggtggaacgcagtttttttataacgaaatagtcagctccgcgttgagtctttatttcttctctttcgtattgaatgatataaagggagaagttgcgatttgttattatcataattcagtaaataccatgaaaaagaagctgatgacttgtctttatctatgtctttctgtcatccatgtttttgctcaaacgaaggagcacgggaggacgggagaatttaatattctggatttcggagccacccgtgatactatgatggtgcatacgaaagctatcaatgaagcgattgaaagctgttacaggcagggtggcggaagagtggttattcctccgggtaaatttaagacaggtactatttttctgaaagataatgtagaacttcatttggataacggtgcctgcctttatgccagtgaggattatgctgattttcctattcagccgagagcagtttaccgctctttgaaagatgcaggcggatggtcggcgttgatttatgcggtgggggctaggaatatagccgttacaggcaaaggtgtaattgatgggagaggaaagggcagaaaagggcgtgtgggcggagtaccgggtgatgccgacggcaggccgcgcaatatcctttttatttcatgtaaaggggtacgtatctcaggtatcagtatgaggaattcagccttgtggaatcaacattatctggattgtgaagatgttattgtagagcatatccatgttttcaaccattgtaatggtaataatgacggtatagatattgacggttgtcgcaggtttatcttgtctgatagtgtcatcgattcggacgatgacggaatcgtgttgaaaagtacggggctggctccttgtgaagatgtcgttattaataattgtattgtcagcagctttgccaatgctataaaatgtggcaccgaatcgaccggaggatataagaatattgtcatttctaattgtattgttaaaccgagttgcaataaaggggaccgcattataaaatctactccaagcggtattacggctatttctttggaggtggtggatggtggaataatggatggcgtgtctattgacaatatcgtaattgagggtacggaatgtcctttgtatgtccgtttggcgaatagaggccggaaatatatagatgaggctccggttcctccaataggaaaaatgagaaatatacagattagtaatgtaaccgcttatgataccggtaatttttgttcttccataacggggattcccggtggtgagatagagaatatttatttgagcaatgttcgctttctaaataaaggcgggcttgtagcaggaaattgccgtacggcgaatgatatgcaagggaaacggcatgatactgccggaaatgtatttcggaaccaatattggtcttcccatcgggaggtgaaagaggatgagaaaggttatccgcaacctactgtatgggggaatctgccgagttatggactgtttatcagaaatgtgagaagtatagctgtggacaatgccacctttcaatcggaaaagcctgatcccaggataccggtaattgccgttaatgtagggaacttgtcgcttgaccggatacaagtcaacgacatttcttccgccggtgtacttttggataatgtcaggacggcggatgtagacagacggttgaggaaaagcggaaagtgattttctatgtcgttaaacaataattaaaccaacagaaatatgaaacggatatatgtatgtctattgatttttttatgctttgcttttgtacaggcgcaaaagataaaacaccctgctttgctttatactccggagcgcattcagcaggtgaaacaacggattgtaaatgatttaaagatggctgaggcatgggcttctataaagaagacggcagatgaacagttacagaaaaagaatctaagcaaggcggattacctggctttggcttatttgatgacagatgaaaaaaaatacgctgacaaattgaaagagattttattggatgtcattaaggaggatacgtggggcagtgaagaaatgctggcgcgtatccctgtctggagagcggatttgggactggcacataaggcttacctttctgccatagcctatgatgctgtttataatgacctttcaagttccgagaggaaagaaatagcggaaggattgaaacggttggcccttgacccgtgtctgggggactgggtgctggagccggcacgtattcattcgttgaattcgatgggacataactggtggacttcttgtgcctgcatgggcggcatactggccttgagtttacaaaacgaattgccggaggcaaagcaaggagcggaggtggtatatgaggctcttccccaatggtttgactttgccggagatgtcttgcagcagaagccgaaaagctttgatgccgatggagggatgtatgaaagtctcaattatgccaatttcgggattcaggaagcattacagtttcgtttggcatggatgaacacccatcccggacaaaagccggttcaaattccgcaactggataaattgtccgatttctttgtgcatgtctgctatccgcgtacaggtatactatataatatgaattttggtgacagccataagaatgtgactgccgaaagtaccttgatgctgctctatgcgatgggaatcaggaatgataatatgctttggtatatgaatcaggtggaacaggggcaacaccgtgacggttattttatcgaccgtccgatgggatttctctatacgcccgatctaagcaaagcgccgcagttgcctgaaataaagaaatcacaactttttgcagattttgggtgggctacgatgcgtacttcctgggagaaggatgctaccatgctggccgttaaatcggggcatacatggaatcattctcatgcggacgccaactcgttcatcatctttcataaaggagtggatattataaaagatgcgggaaactgctggtatcctaatcccagttaccgtaattatttttttcaaagcgaggcacacaatgtcgtgcttttcaatggcaaaggacagtcgcgtgaacaacaatatcatggttcaatgctgagagggtatttacattatttgctcgatgcggataatgtaaaatatgtattggccaatggaaccggcccgtattcagaccagtttagtcgtaatttccgtcatttcctgtggatagatgatgtgatttatatgattgatgatttgaaaactcatgatgtgggacattttgaatggctttggcatccgggaggagaggcggaaaaacgtggaattgatctgaatataacaaatgggaattcttcagttgttgtccgtctgctatatccccgtttgttggcgaaatccgattttgtacatgattaccccgaagatttatattgggaagaagtagaagctccaacggaggatttaaaaggaacagaaacgtattattcatttcatttgccggcaaaagtggatcgggtgaaagggctgaccgccatcatcttgaaagaaacgccggaccagaaagatcttccttatatggaaagacgggaaggcaaagattggataggacttcgtattcattataagggaaaaataacagatctctatatcaatcaattggccgacgggcgattgatgcatagcaattcatggattgaagcggacggatggtttacggacgcttatatgtttgcagtcacttatgaggctggtatggaaccagccggttcaaaagagcactttatttgttatggaagcgctttaagacgaggagatgtttctttcttttcttctttggctaagctttttgtgattcaaaaggaggaaaacgggcggatgaaattgtggatggatggtcaaccgaagatgaatgctggattcagaagcgagaaacgtccgaaagcggttgtcgtgaatggaaaggtaactcctgtagtttatgagaagggcacggtaaaagtatcaggcgtggttattgaatgagcgggtaaggcgaagaatttggtggaagtttattttacgcaaaggtttgcgtgctttttgttaagctggctggtacttatgtcagcttaatctttttatttttgagcatataaataaacgatttgttaacgtgtaaaataatgatacgatgaaaaagctcttctttttaatggctgcgagttttttgtttgctcctgtacatgcacagataaccgagcgtgaacgtcctgccgaatggcaacatctggtaaagggtgcacgttttatggaccgtttccttccgatgcccgacggtatccaggccaaggggatatggggaactgacagtgtgctgaaccgttatgtggataatggcattgagcttcccggagtttctttctggggaggaaatatattgcaggatacggaaggcaaatatcatctgtttgtgtgtggctggcccgagaactctccgaaaggtcacatgttctggtcaaactctaccgtttttcatgcggtaagtgaccggctcacgggaccttttaaaatacggaattccattggaaaaggacataatccggaagcgttccgtctgtcggacggccgtatcgtggtctatgttattgatggttattatatagcggacagggtggatgacaaggtttggacgtatggaaagttcagttttgacccgcgtgaccgtaaaatcatagaaggcctctccaatctgacttttgcccgtcgtcaggatggctcttatctgatggtatgccgcggtggaggtgtctggatcagcaaagacggactttcaccctataagcagttgacggacaaacgggtttacccggacgtggagggccggtttgaagatccggtggtatggagggatgatttgcaatatcacttgatcgtaaatgactggttgggcaggattgctttctaccagcgttccaaggatggagtacattgggtgacggaacagggagaagcatacatgccgggcgtatcattccataaagacggaacggtggagcgttggtttaaatatgagcgtcctaaggttttccaggacgagaaggggcgtgccgtccaaatgaattttgccgtgattgatacgataaaatggaacgaccttcctaatgacaaacatagttccaagaacataagcgttcccttgaataaagggatgctattgtccgttttgaatgaaaaggagatcactccgtctacccgtaccattgaagtgaagattgccgccgaagaggggttccatccgcaaacggatgtggatgtaaagtcgttgcggttcggttcgtttacagaagtgaacttcgggcgtggttgcaaaccggtgaagaccaaggtttcgggggaagacttgattgtggtttttaatgccgaaggaagtggaattacctctggtgagtttgctcccaaaatgataggaaaacacaggaatgggaacatgctttacggttatgcccgcctgccttatgtgaattaccggccggctttgctttctgcccgtcgtcctgtgtttgataaggaaaaaggggaattgaaagtggagatacaaaactttggattgtctgcatcggaaccggcggaagtggaggtgatatgtggcggccatagcttggggcggatgactctaaagacattgcagccttatgaagtagagtatctggccttctctccggatgcagccttggcggatgacaaatcatcttatgaagtcgtatttttttatgaaggaaaagaggtggaacggaacagattcggaaaagactgatttaatttgtaagttgacggttgataacatcttatttttgagtgaaaaacgtttgcccaacgtatctaataagaaaaatgcaaaatatgaagaatttattgaccttttgtcttatggtatgctgtgtggccgtacaggctcaattagtgacttatcccgaaggactgcagaccggtatgcctcataatgatgactatacggttcgtgtccgtgtgccggggggcgactggaaagatctgtttgagtataatgtgcaggtagatatggatagggtacaggatgcttcgatggtacagtttgatatgggcagtcctgtagaagtgatggtgaaaaaaaataatgggatgattcatgaggtcgatatccgtccgcaggccaggaaagtgcagtatgtgcagaataagaatgtaattacgtttacgctggacaaacctcagtatctgtctgtggagtttaatggcgaccgcctgcataatctccatctttttgccaatccgatggaaacggagacttactcggaagaagagaaaggagtgatgtatttcgggccgggagtgcatcgtcccaaagatctgccgaacaatcagataagaataccaggcaatacgacggtttatctggcaccgggagctgttgtgaaagcgaagttgctgctggataaagtggagaatgtacggatcattgggcgtggcattttggaccatcctgttcgtggtattgaaatcactgattctaaaaatatagtgatagatggcataacagtggtcaatcctgatcattataccgtatttggcggaggtgctgagggggtgacaatcaagaacctgaaatcattcagttgtaaaggttggagcgatggcatcgacatgatgtgctgtcacgatgtattgatagacaatgtgtttatgcgtaatagtgatgactgcattgctttatataatcatcgttggaactggtggggcggttcggacaatatcactgtacagaataccattctttgggcggatattgctcatcctatcaatgtaggtggtcatggtgatccgaattctccgacaggagagattattgagaatctggttttccgcaatattgatattttggaacatgatgaagatgatgtgccttatcagggatgtatggctatagatgcaggcgacaggaacagggtgaaaaatatattgtttgaggatattcgtgtggaaagtattcaagaggggaggctgtttcatatcaatgtccgttttaacgggaagtatgacaaacaacccggacaaagcattgatggagtgactttccgtaatattacttataacggggtgggagaaaacccgtcactgataaaaggattggacaaagaccggatggtacgggatgtgatttttgagaacgttgtggttaatgggaagaaaatgaaagatttaaatggttttataaccaatgaatatattgaaagaattgaagtcaaatagtatcttttatgtaaatctaggaatatgaggattctggcatttatttgtttattaatattatccggtttgaccggattatattcacaagataccggcgatgtacaggtgaaaagtggttatatgaaggttccggaaggttctttgtattatgaagaagcaggtacgggagagccgcttatttttattcacggacactctttggaccgtagaatgtggaatgaacagttctttaagtttgcaaagcattatcgagctatacgatatgatttgcgcggatatggcatttcatccaaacaaacggaagatttccaatttacccatgcagaagatctggttgctttgatggatgctttgcatatacggaaagcgcatattgtaggtttgtctttggggggattcgttggtgcggatatgctgggatgttttccggaccgtatgttgtccgctttcttggccagcggaaatatccgcaaatcaaaaggacccagtgagccgatgacaaaagaggaagcggcaaaacgggatgaagaaatcgcagcactggaaaagaaaggagtggatgtgatgaagaaggaatggttcgaaggactgatgcagtcgggtggaacaagaaaagaaagaatgcgtgtgcctctgtgggagatgatcgatgactgggatgcatggcagcctttacataaggaggtgagggtgataatcggactggatgcttatgcaaaactgaaagaaaatcatcctcaggtacctactttgattgttgaaggcaggtcacccggaaacagatattccgatcatcctgagattttggattatcttccgaatggaaaattgaaagtgctggatgattgtggtcacatgatgaatatggagcaaccggaagcatttaatgaagcattggaagaatttttaaatgacttggaataaaagtggttggactgctgaaaaaggaagaggtattttgagtgctctcttcctttttttcgtattataaaatagagattccaataatcggatagtaaatgaaaaaatacaatgatatgaagaggaaagtatttatagcggttatgtcgctagttgtttcaggtggtttgtctggccaatcagtttatcccggccagcattccggaaaattgaaaaaagaaaccatagctccgatgcaagtcaagagctttgatttgaaggatgtccgtttgctgccgagtcgttttcgtgaaaatatgatgcgtgattctatgtggatggcttctatagaggtggacaggctgttacatagtttccgtactaatgcgggtgtgtttgccggtcgggaaggtggttacatgacagtaaagaaattaggcggatgggaatccttggactgtgaattgcgtggacacaccacagggcacttgctttctgcctacggcctgatgtatgcggcgacaggcagtaaactgttcagacacaaaggagacagtttggtaagtggtctggctgaagtacaaaacgcgttgggtaatggttatttgagtgcttatcctgaagaattgattaatcgtaacatccgtggcaccagtgtatgggcaccgtggtacacgcttcataagcttttctctggattgatagaccagtatctttacagtgacaatcagaaagctttggaggttgttatccgtatggccgactgggcctatcataagctcaaaccattggatgagactacacgtcaaaagatgatacggaatgaatttggtggagtgaatgagtctttttataatttgtatgcgataaccggggatgaacgtcatcggtggctggctcaattcttttaccataatgaagtgattgatccgttaaaggaactacgtgatgatttgggtactaaacataccaatacatttattccgaaagtgatagccgaagctcgtaattatgaattgacagaggatgagaacagcagaaagttatccgatttcttttggcatactatgatagaccatcatacatttgcccccggatgcagtagtgacaaggaacattattttgatccggcccggttctccaagcatgtgtcaggttataccggggaaacgtgttgtacctataatatgttgaagctgtcccgtcatctgttctgctggacagccgatgctgctattgcggattattatgaacgtgctctttataaccatattttgggacagcaagatcctcaaaccggtatggtgacatatttcctgcccttgctttcgggttcgcataaggtgtatagtacgaaagaaaactctttttggtgttgtgtgggcagcggctttgaaaaccatgctaaatatggagaagccatctattatcacaatgataaaggcatttatgtgaatctttttattccttcggtagtcaattggcaggagaaaggattgactctccgccaggaaacggattttccggcagaggaaaccacagttctgaccataggcactcaaagtcctgtagagactacggtttatcttcgttatccttcgtggagcaaggaagtgaaagtcgctgtaaatggtaaaaaggtggcggtgaagcagaagcccggttcatatattgctatcactcgtctatggaaagacggtgaccgtattacggctgattatcccatgcgtctccgtgtggaaacgactccggataatcctcaaaagggagcgttggtttatggtccggtagtgttggccggtgaacggggaacagaaggaatgcaggcacctgcgcccgattccaatcctgctttgtacaatgattattatacgtatgattatcatatccctgtaggacttcgcaccacgttaaaacttgatgtcaagcatcctgaacgcagtgtacggcgtgtcggtacggagttaaagtttacgacttctcaaggagatgtgatagaaccgttgtacaatattcatcggcagcgttatgtggtatattgggatttggagaaagaataaatttcattattagatgagtaaatgaatcctttgattcgtatttatatatggtttgactaatcaaatgatataggaatatgaatagaggattcgtttttattttcaggttggcagttcatggaatcagaatgaaaaagattctagccgcctttattttggggatgggatgtatgttggctgttcaggcgcagcaacacccttgtgtctatgttgctccggcggatagggcgtctgttctgcaaaaagtgaaaaatgagccttgggctggggaagcctttgcagctattcgctccaaagtggaaaaatatgtggatcgtcatcagactgatcccgaatggataacttcccggctggccatgtattggaaagatggagagcgctatactcaatgttatttgaaaaaacagaattgggactatggagaggggaatgctcctgttcccactgtaagaatgccgggaatgcgtacttggaataagtatgtcaatgttccgctggaggaccgcactccttataatgaaacaggtgatatgtggggaattaataaattaaatccttcggagccttcggtcaaagtgccttataaggaaagcgggcacatgatacgggggaataatgtcgagatcttgacattagcagaaaatgccgcttttgtttattgggtgacaggagaagagaagtttgcccgttttgccacagatatatttaatgtgtggttggtagggacgtattatatgaatcctattttggaccctgaaaagtcgtgtggcagtgtcggtggttgggaaccgggaggtatttgcggctattatgattacgaacagatacatgatgatttggtaatgcatgcggcaatggcgtatgattttgctttcgattatttgatacggcatcctcatgctcatctgaaagcaattgggaaagatacaaaaacggtagctgccgaagtctttaagcgttttatcaatatagggctggtacgcggtggcaaatcgggtaactggaatgtgaacgggtggaatataatgctgcgtcctatgttggtgctcgatcataatgaggcttatgctgacggtaaaggaaaagagtattatttgaatctgctggtgaacgaatctactccttatcatgatgccattcccgatatattgaaaacttacgatcgggtgacagggctgtggccggaatctcccggttattcattcggtacagtgcagtcattgcttgattgggcggctcccttgaaacgtgccgggatagatatcatagccggtaaccccattttgcagaaagctgcaatggctgtatttccttggatggacgatgcagccaatatggtggtgttcggtgattcacgtgggggaagtgctaattttcagacgtttgaaaatctgctgacttattataccggaacagataataaggagggggtggaaaaagtggcaagtgccttgaacaaagggatttctcaaaagaaatactccagaaataatgccggttggacagggctttgtacctatacagctaccatcccgtctgtacgtgcagagagtaatgagcgtgcgtcttattctccccatcatcgttttattacaatgaagaactgggagggagattataaaatgatgttcactctgtatggtggtaaaaaaggataccatctcactccgaacgggttggctttacaattctatgcgtatggttatgcgttggctccggatgcagcggcttatgagtcctattggagtaaagatcatggataccatcagtctcctacaggttctaatacggttttacccggatatacggaaggagatatcactattcatgctatggaacctatggtgaaggagggagaattcgtaaatgatagggaattaactccttacctcaactttgccgatgtgtctgccggtgagaaaagaagaatggtcgctatggtccgtacttcggggaatagtggttattatgtggatattttccggtcggacagggcggataatgattatttgttccatcatgtaggtacttcgatggaaatcactgattcggaagggaacaagcttcccggtgaggctttggagaagtttgacaagacgtggcatgaaggatatcattggttttccaatctgcataaatccgattataaccagaatttcatcgcttcatggagtatgcccgaagatataacggcgcgtttatggatggcaggaggtgagggacgtgaaatttatcaggtggatgctcccccgactacaatgaataaagggttgactcccggcgatatttgtatgcctcctatgccgactcctgctttgattgttcgtcaggaaggtaataatgctcatactcatccttttgtttctgtttatgaagcgtataaaaagagtggtccgaatgtgctcggtgtagaagccttgcagggagatgatggctctaccggggtgaaggtgaatacggcggacggatatgcggattatctgttcactgcgacggacatgcaggctcatcatccttccaaacgtgtttcattctgtggcaggttaggattgataagagaaaaagaaggtcagattcaactgatgtatcttggctgtggccgttcactaaagaaaggtaactttgttttagaatcggatcatgacgtatatgctgcaatctatatgcagcatggtgtttggtactattcagcaaccggtcctgtacgggtgaaaataggaaaagaaaccaaaaaactgaatgaaggttacaatcaaaaattataatttttttgtgcatccttattcaccgcagggactaatgctgaaggtctctgcggttaattgttttatcctatagattttatttttcttttcgttgagtgagttttccgattcatccgtactactaattaaaaagtaatcattatgaaaaaaataatactcatagcatgtgcgttgacctgtacggcttcgctttatgcaggtcattctaaagaattgaaattgacgtccccggagggagttcatgaagtcatgttcaggcaggagaaaatttcttcttcggtaaatgaaatagtatatcaggtaaagtatagaggcagagaggttatcggaaactcccgtgccggtcttcagctggataaccgtacttgggaactggcgcttgcccgtaaaataaatcaggtaaaatgttggatggataatttggaggtggatagtgtgatctatcagcctgctgtcaacaagtcttggcatcctctgtatggagaacgtagtacggttcgcgaggcgtataatgaggcaatcatgtatctttccaaaaaagacggttccaattatcgtttgaatattgaagtacgtgcgtatgatgaaggcatcgctttccgttatttttttcctgaacatccacaggccatttttcataaagtggtgggggatctgactgaatatacgttttcccccggtgcggtggcgtggacggagcaatgggcgcaagctccttttgagcgccttgccattaatgacatcaaattgccggtagaacgtgctttgaccgtagaacttcccaatgggctgtgggtagctttgactgatgccgatgtagatgactggtgtttgactaagtttgtagcttctccaactaaacagaatacactgacttcggtcatgtatagccctgtggatattgttacttattatgctactccatggaaaattatcatggcggctgataagccgggggaattgctggaacacaacgacatcatccagaacctgaatcctccttgtgagataaccgatacggactggatcaggcccggcaagattatgcgtgaaacgactattaccaccgaaggggccatagctacaattgatttctgtgctgcccatcatattccttatatgttgttcgactggcaatggtatatgccttgtacttctcatgacggagatgccacaaaggtggtttccaaactggacatgccacgtgtcattgcatacgggaaagaaaaaggagtaggtgtatgggtgtatgtcaatcagcatgccctgatgaaacagatgcatgagctttttccattgctgcataagtggggagtcgtaggtgtgaaatccggtttcgtacagtatgccagtcatcgttgggctacttggctgcatgatatggttcgtctggctgccgaaaacaaattgttgattaatattcatgatgagttccgtccatccggtttcagccgtacttatcctaacttgctcactcaggaagggatacggggaaatgaggagtttcccgacgctacgcataatacgattctgccttttacccgtatgattaatggagcggcggattataccatctgttatttcgacaaacgcctgaagaacacccatgctcatcagttggcggcttcattgattttttacagtcctttacaaactatcttctggtatgaccgcccttcattctatcaaggggagcccgaaatagaatggttcgagaatctgcaaaccgtatttgatgatacaaaagtattagaaggtgctccgggtaagtgtataactatggcgcgtcgcaaaggtaatgactggtttgtaggagctttgactaataatgaaggttctgctcaatcggtaaatctttcatttttagataagggaaagacctatctggcccgtatttatacagatgggggagataaaatgaagactcgtactcaggtgaaatgtacccgtttgttggtggattcttctcaaatcatgcagttcgcattaaagcctggaggtggtgtggccatgcaactcgtgccagcgacggatcaggaaatagaagaatataaaaagtatagaggacaagtattataaaaataaccactttcgttgagtgtattggttttcttgtccgtattatagatagattaggttaacaaaaatgaaggttaggtgattttttagtttaatagagtacgttttttaaggtaagaatgattgtttcagggcatttttataataggtaagaatgaaaaagatagtgattatagcggctttagtatgtggtgcatggcaacaggcagatgctcagtatgtatccaaggtatgggtgcccgatcagaaagacggtacgtatattaatccgattattcatgcggattactctgatccggatgtttgtgccgcaggtgatgatttttacatgaccgcttccagttttggctgcgctccgggattgcccattcttcattcaaaggatttggtcaactggcgtttggcaaactatgccttgaaggagatagagccgaccggcttctttaacgctcctcaacatggaaaaggggtatgggctccttctatccgttaccacaacggtgagttttttatctattggggagatcccgattggggtattttcatggtaaagactaaagatccgttgggtgaatgggaaaagccggtcttggtaaaggccgggaaaggaatgatagatcctactccgttgtgggatgaggatggaaaagtgtatttggtacatgcgtgggcgggcagtcgtgccgcattcaatagtgtgattacggtttgtgagatgaatgcgggaggtacaaaagtcattagtgaacctgtattggtttttgatggtaatgatggggtgaatcacaccatcgaggggcctaagttttacaaacgtaatggatattactacattttggctcctgcaggaggggtggtgacaggttggcagttggcacttcgttctcgtaatgtgtatggcccatacgaatcgaaaattgttatggctcagggagatacagatataaatggtcctcatcagggaggatgggtggaaacttgtacaggcgagtcttggtttatcaattttcaagataaagctatgtatggtagagttttgcacttgaatcctatgaagtgggaaaatgattggcccgtgattggggaggacaaggatggagatgggtgtggtgaacctgtaaaacgatataaaaagccggatgtaggcaggacttatcctatagagacaccgattgagagtgatgaattcaacacaaggcaattgggcttgcaatgggaatggcatgccaattaccaggatacgtttggctttacctctgatttgggttacattcgtatatatggacatattttgtccaaggattttgtgaatttttgggaggtgccgaatctcttgttacaaaaattccctgccgaagaatttacagtgactgccaaactgaaagtttcggcgaaagcagacggacagcagtccggactgatagtgatggggtgggattatggctatctgggtgtagtaaaagaaggtgataaatttatattgaatcaagtggtctgcaaggatgcggagcaatggtctcctgaaacagtgacccgtcttgcggaattacctgtaagccgccggttcggagccgggctctatcccaattatgagcgtgatatttatttgcaggtgaaagtaactgggggaggtatctgttatttcagctacagtctggacggcaggaaatatacatcggccggagtgccttttaccgctcgtcagggtaagtggataggagcgaaagtaggattattcagtacagctccttatggtaaggaaagaggttgggtagatgccgattggttccgtatcaataagtaaaaaagaaaggataattatgaatacaaaaaatctattagtaggtatagggttatgtctgctttcagcctgtactgaagtagacaacaaactggaggtggacagagctttggaatattgtgatcgccaggtacatcgtactttggaggttatgcatggaaaagggcgggaggtagattacactatgatgcctcgtaacataatggatggccagtctgactggaactatcgtaaagtgagtaaggaagaatggtgcggaggtttctggccgggcatcttgtggtatgattatgaatatacacaagatccgaaaataaaggaagaggccgaaaagtttactgcttctttgaaatttctctcggagattcctgcatacgatcatgatttgggttttttggttttttgtagctatggtaacggttatcgtctgaccggtaatccggaatataagcaagttataatcaatacggctgattcgttatcagcattgttcaatccccgtgtaggtactatgctttcatggcctcgcaatgtgaaaatgtttggcggtcataataccatcatggacaatatgatcaatctggaaatgcttttctgggcagccaagaatggaggtaatccttatttgtttgacattgccgtggctcatgcggataagacgatgaaatatcattttcgtccggattatacctcttatcatgtagcagtgtatgatactctgacaggtgaatttatcaagggagtgacccatcaaggttattcggatgacagtatgtgggctcgtggtcaggcatgggctatctatggttatacagtcgtttatcgggaaacaaaagatgtccgttacctcgattttgtacaaaaagtaacggatgtatatctgaaaaatctgcccgaagactatgttccttattgggattttaatgatccgtccattcccgatgctccccgggatgcttctgccgcttgtgtggtagcttctgctttattagaattgtccggttatctgccggctgaaaaagcattggaatataaacaggcggctgtaaaaatgctaaccagtctgagttctgacaaataccagtgtggtgaaagtaaacctgctttcctgcttcattccacaggacacttgcctgccgaatcagagattgatgcatccatcatttatgctgattattattatatggaggcacttctccgcctgaaaaggctgacggagaataaaccggtcattgacgaataatagattgttcagggaagtataaagtatatagagatctgtagttttcttataggtggattatttatgataagtatatcccgttttcacctactgatgaaaacgggatatactgttttacagcaggtaactaaagcttttagtttactttaactatgaaaattagttttgtaactaaaagttttagttctttgtgataatcaaaagaaagattatgaaaatgttgacagcaaaggaagaagagattatgggttatttttgggaaaaaggcccgttgtttgtaaaacagttacttgatttttatgatgaaccgcgtccacatttcaatactctgtctaccattgtgagaggattggaggaaaaggggtttctcagtcatgaggtatttggaaatacctatcagtattatgcggtggtaagctgtgatgattttaagaagaagacgttgaaaggggttatcagtaaatatttcaataactcttatttaggagcggtttcttcactggtgaaggaggaggagatttctctggatgaattgaagcagcttatccgggatgtggaaaaggcgcatgaataatccggataaagagaataattaaagatacatactatgggagcattttttgtatatattgtaaagtcggcagtctgtctggcggtattctatttattttaccgcctgttgctgagccgtgaaacattccatcgttttaaccgtattgctttgttgggaatactgatattgtcctgtgccattccctttgtggaagtgaccatgaaagaaccgatggaagtcagccaacaattgctgacttgggaagaactgctgcttatggctaatcttaatcggactgctactatagaaactgctcccgaatctgctattatgtggcgtgaagcgctgctgatggtttatttgttgggtattgtattcttctttttacgtaatgtatggtcgctgacccgtatgctgaggctgataaagggtagcacccttgtccgtcaggaaaatggtattacgctgataacccaccaaaaagaaatcgctccgttcagttggatgaagtttgtagtgatctctgagaaagacctgaaggaaaacggtgaggaaatactgacgcatgaatacgctcatatacggaagagacattccatagatttacttatagcggatatctgcatctttttccaatggttcaatcctgcttcctggttattgaaacaggaactacagaacatacacgagttcgaagcggacgaaagcgtgattgcacaaggtattgatgcaaagaaatatcagttgttattaataaaaaaagctgttggcacaaggctctactctatggccaacagcttcaatcacagttcacttaaaaaacgtattactatgatgttaaaaaagaaatccaatccgtgggcacgactcaagtacctgtatgtgcttccattggcagtcattgccgtggcagcctttgcccgccccgaaatctctagtgagttagatgagatttcagccgtcaaagttaatgatttaacggcaattatgaaaaccgaagaggttaaaagtcccgaaaaacatcctgcaaaggaaataaaagtgcaagggcaggtattagaaaaaagtacaaacgctccggttgtaggtgctaatgtgattatcaaaggtaccacttcaggtacgatcactgatttagatggaaattttgttatttcaatgcctgttggggctactttgagtgtttcatatataaatatgaaaacaaaggaattgactattacagagaaacttattggaaaaattaaatctttaaaagtgtatttggagggagaaatcacaactaagacacaggaagtggttgtagtaggttatggaggtggtgaagaagcttctgatgaagttccggtttttcaggttgttgaagagatgcctgagtttccgggtggtatgggagaatgtttgaaattcttggggaagaatatcaaatatccagtggaggctcagaaagctggagtacagggaaaggttattgtacaatttgtagttgagaaagatggtaatatagccaatcccaaagttgtcaggagcattgatccggatttggacggtgaggccatccgagtcatttccattatgccgaaatggaaaccgggtatgcagaaaggccagcctgtgcgtgtgaaatatacggttcccgtcactttcagactagacggtaaagatacaaaatcaaatgaaacacgtcatttggagttgaggacagactctgtttttcaagaaaatccattgcggataggtaaggaaactttttcgttgaaagattggaaggaaaaaccattgcttatagttgatgggatagaaaagccttatagtcaaatggaaaaaatgaatgcttcggatattgaatctatttcggtgttgaaggatgcggcaggtactgccatttatggagccaaggccaagaatggcgtgatattgattactacaaagaaacaataagaataaagatatgaagaaatttgtaacactgctactatgtatgctccccatttcgttgtttgcccaggtgaatgatgggattcgtcaggcaatggataattatgattatgagacagtagttatgctgattgaatccgattgtcaggattctttattgcttattaccaaagctcaggcgctgaaagcgatgaaccgttatccggaagccataggggtattgaactctcttatcttgaaagacagcacaaacacaaaagttttgatcgaccttgccgagtgttacaaattgacgggtaactcccgtcgggcggccaactgttatcagaaggcaatgaatttgcaaccggaaaataaatttttccggttgcagttcatacgctctttattagcctccgaagattatgaagaagcacgtacggcttgtcatggctggttggagcgcgattccttgtcggccaccggatacaaatatctgggacaggcatacgagggattgcaggatgccgccagtgcctttcttagttataacatagcctatcggcgtgattcgttggatgcccagacagtggcacgcattgccggtatttttaataacaatcagcagtttaaagatgctgttgatgtgacggaagtttatcgtttgtccgataccaccaatatagatgtgaaccgccagaatgcgaaagcttattgtatgctgaaagagtacggaacagcggtaaaacgctatgagtcattaaaagaactgggtgatcgtagttttctcactctttactatttaggtgtatcccattatggggataactggttttatggtgcatacgataatctgaaagaagcctatcaaaaaaatccgatggatgtgaatgtgctctattatctggcaaaagcttcggcacgcacttcctggaaaaaggagggtgtggaatatatggaagaagccttccgcatagcggttccttctgatagtatgatggtacgtctttatgacgggttggtagaatgttacgattatgcgggggatacaaagaaagaggtggaagccttggagaagttatatatttatacaaagaaaaactccattctttataaaatagcctgtctctatgattggaaagaagatgagaagaatgccattcgctattataagaaatacatggctactgttcccgaagatcagcgttatgccttggacgaagacgggaatccggtggaagaccgcataacactttaccagcaggcatggaaacgtatcaaaaaaataaaggaggaaggtttctttagaggtgatattccgacaaagtcatttcctgtagagaaaaaagatacgttggcacttcgtcatgcaaaataacggaagtcatttatataaaagtaagaatatatgaagaaaattttggctttggcactctttgcagtggctctagtatcatgccggcaaactatgcagaccgatggctttaaactctccggtcatttggaagggcttcaggtcggagatactctttttcttaaaacttttttattgcccgattggaaagaagacgggacagataccatattggtggaaaaggagggaactttctcggcttttattcctatggaacatactactttttatttattgatgcatcagcctaaaatgggtgaaccgttacggagttgtattcgcggagctgagattatagctcgtgtaggtgatgatataaaactgaaagggtctttggattacttgggtgcggttcgtcattcgggtggtttttatgacaattcgttggtggctaggtacgatagcctgactgcgtcttccaatactgaaatgattgatatcttcagtcagatactgaaatatcaggatacaaagcaaaatgatagtgtggcaaaatacgggcaaatgtataatgaatatcatcgtccgctaatactgaagactgttcgtgatagtctggcattgaaagtgaacgatatggaatatgccgcttttatgtatgcatccgcttttgtttttgatgctacttataaggatgtgaaagagcgtttggcacaatttactccagaggttcaaaattcatattttggacaaatacttgacaagcaattgcttgtattgaagaatattgaagtaggctttgcgccagcggagtttacagtgacagataaagatgaccggaaggtgtctttgtctgattataaaggcaaatatgtgttgatttatcattggggattatgtcctggtactttttgggtaaatcctaaaataatggatctctatcaaaaatatcatgaaaaaggtttggaggtattgggatttacccgtgatgatttattgaaatcgttgcagggaagttctgaagagtttaagaaagatgaacgggtacagggattgctaagccatccgtggactacagtttacacagaggaggagggtaacggctttatagtgaaagacctttatttttcaggagttcccattcttatgttaatctctccggatggtattactttggtccgtggatatacaaaggcatacgaagaagtaaagaatattttggataggaacttgggaaataagtaagtatgttaaaaaaaaatacaatgaaaaactttggtattctattgcttgctatggtgagttgctgccttttgcaggcaaaaaaccgggtggttaaacagccgcctttcatcgctcgtagttcttctactattgagatagacagagtggtggtttcggatacggcaaccgtattggatataaaagcctttttccgtcctcataattggattcagataagtaatgaaagttatttgttggctgataatggagagaagtatccgattcgttccggtaatggaatcactttgggtgaaaaattttggatgcccgatagcggcgaagcttcttttagtcttatttttccgttattgccccccacagtgaaagtgattgatttcattgaaagcgattgtgaagattgtttcaaggtatggggaatccatttggatggaaaattaccggaattagatttatcggatgatgtgaagaaacagaaattgaattacgatgaaccgttgcctaaggctgaattgaaagatggcaaatcagtgataaccggtcgtttgttaggctatgagaagcactatgcacttccgttttcttgtaggacttgtgatttgttgacggctaaatttgaggatactgaaattaaggtgaatgaagacggaacatttcggacagagattgaactttgtactccgactacggtcagtttttctgtgggacgtgatatttattttgatgtatttttagttcccggtggtgaattggatatggctgtcaacttgcgtgagttgagtcgttctgaaagcaaattgttgaaagggaagcgtgctggtggaaagaaagtctatttttcaggtaccatggcggctttgaatgatgaaatgataaccgatgatgaacatttgatggatgtatggggaatggttcattggaatatgaatgatttatataatatgactgccggtcagtataaagcttattggttgaaaaaatatgaagaaaccaaatctgctatctgttccgataagaaaagaagtcaggcataccggaatcttttattggctcagaatgatttgctttgtactttgacattgacccgtgtaagctctaatttagcctatgcttatgtgcagtgcagtggattaccggctcgtgaagcttatcaaaagtttaaacaaccggaattgagtgatgatttctatgactatatccggcagctgaatatactgaactcgcctgtcatgctttataccaatggttatgctgatttggtgagaggaatgggctatatgagggtgaagatggatgataagttgagtgatatatttgcgtttattctctcttccgataaagtttctgttgaagatgctgagataatacgtgagttcaaggctgatacagatgccggaaaaacatctgtctatcgggaaaaaatgggagaattgcgaataaaatacgatgatttgtttaaagaattcagttctatgcagcaagactatatcttgaaaaagattatagccggatatttgggtacagagcaaggactttttttcgatctgcagaaaatgatgaaatatgctcagaaaatcagtgacttcactccattgactatacatgattttgaggagatacggaagatgagtgatccttattatctcagcagactgacaaggatgaacaaccgtcttttggaaacgattgaagctaataagaaaaagaaaggttatactgttaatgaatccggagaagtaaaagatgaagatttattttattctatcacttctaaatttaagggtaaggtgattttggtcgatttttgggcgacttggtgcggtccttgcaaaatggctatgaaacagatgaaaccgatgaagaaagatcttgaaggtaaagatattgtatatgtttttattgccggagagaactcgcccaaagaaacgtgggataacatgattccggatattcatggagagcattaccgagtaacggcggctcagtggaattacctgagcaagcagttcagcatacagggggttccgacttatattattgtcgataaagaagggggtattattcaaaaatacaccggtttcccgggagtggataccgtaaaaaaagaattaataaaagcattagagaaataaagaacgtgttcgtcttgcaagaataaagtggaaaaggatctgtaagctgctgtaagcatttacagattctttttttggatttatattactatctttggcaagacaaaactaatattgaataatgaaaaactgggtcgttaagttattggtattacttttcattccttctttagcaggaatcttgttcactgttgctcttggttttaatccggggggctggttacaaattacgacgtatgctttccctccgttactcactctcgccggaggggcttttatcattgcttcaagatggaaaattccttttcttatattgatggcggctgccagtatggcctttaatattcctttacagaactggctttttcattcggcagatgaagtggtgcgttatcatgctgttaccgatttatataatggggggaataatgctctgtattttactttcgatactctggaggtggattatgcccgaaggagcagtgtgactgtcactcgtgaggtgacacgaagtatgggcagacaccgctatcgtaaggaacagaagcaatatcatttctctgtagctcctgcatttaccgattcattgccccgtcataagtatgaggagcgggaagttaaggcatgggttattccggtgaggcatgagaaaggacaagccgttgtatgttatgagcgttgtatttttgatttagatgattatcaaagggccattgatcggtcccgctgtaaactccaccatcctcaagctccgattatacgacctttgtattcacagttcattacccggcaggaatggaaaggaatctttctgaatgttgcatggattgtactttctgtactgatggtactgggggtaattttgaattatcaagcagacagaaagaaagcataatatcggaacagactgtatgaagggtactttatgaatattatgattttcatgcatgtgacctgtcaatgttattagtaaattctagaatgatgttttctttatataaaactttccccggacatttcatgacagaaacatccggggagaggcatttcgctttttatttattgcagagttttattttgcctttacattcagattggataattctgtgtccttatggatggatggcagattattctgttttacaacaacagtatgaactttcccttttgccacttgcggcaaagtgaatttctgtttgtagataacctgttccgctgatgggcgcagcagatagcctgtttctttttcaaagcggttgtatattcttaccacaatttggttactgcctttttgaagtggtagcagcaccttttcctcacggaacttgcagcggtaagggttgaggtgtttcattacagacttgccgttcagatagatttcgataccgtttccagcacctacatctactagaatatcttgtgctttgggcgattctacctgctgcattaggaagtaactttccagaatattgctggggaacatggctttttcctcattcacttctttccattgtccttttcttaccggtgctttttccggatcagtatggatggtggcaggagcatcgaacaatccgctgcccggcccgcagaagtaacgctgaccccatacggccttggaagataggtttagtgcctgtgccttgcttgcgtcaagggttactgtgtaaggtgttccatctacttcaaccagtaattccttaccgttctcctgcggagtataggtaaattccaatgcgttgaggttggatttgttgatgctccattgatagctcaccgtactgcggtagttgctgtaataatcgaaacaggaataactataattaggagtgcgctgtgcagctataggttgtggtttcaccggttggtcgaacgtgacgcaaatcacttggatatcttttccatatgcgtcggcgggcagtgtgaagatcatctcctgtcctttctgaatcgctttaatgtctgctttttgcagtttgcatcccggtatgttcaaagtgattttatcatcggcaggacggttgcccgataagatgaggtagaggttattgcctttgcgggtaatggttccccattcgaattgctcgcggaaaggagaggcttctgtaccataaatggcttcaccgtttttcttcaaccagataccgatttctttcagcacttctctttcaaagggtactacggaaccgtcgcctttgggaccgatgttcagcaggaagtttccaccatgggaaactacattgatcaggctgcgcagtttttccatcgctttggtgtgaacgtccccccttttttgccaggaacggtagctccaggtttcatcgaacatggaagctgctgtttgccatgcggtctgcaaagagccttcgggatatgtgttgtctgccatgacactgaagtcatactgatcgttgcccaaccggccgcttaccatacagtctggttgcaatctgtgcactagttgatacagttctttgctttgttcaggagtgttggaacccatgtcaaaccaaagttcagaaatgggaccgtagttggtcaacagttcggtaacttgtgctttggtgaattcatggtgttgtggggtgatgaaatcacagttatggctggagatgggataggcttgtggaaaatgccagtctatcagtgagaaatagatgccgaagttgattccgccacgtttgcaagcttccgccatctcttttataaagtcgcgtttgccaggggtggcatcgtatgaattatagtcggtggtggctgtacggaacatacagaaaccgtcgtgatgcttggtggtaatgatgatggagcgcataccggcttctttggccagtgacacaatagcgtctgcatcgaacagggtgggattgaaacgcagagcggtatctccataccaatcactgaagattcccgcaaacgactggatttgttcactgtatcctcgggtgacggggctgccttcccatacgcctcccagttcggaataaagaccgaagtggatgaacatggaatacttgttttgatgccatttctcaaatgcttctttcgagatttgggcggttacacccaggctgatgacgcaagccatgatgaaggttagtaattttttcatgattgtaattagtggttaactgaatgaatatattgcataatttctgtttgctggtcgggatggaaccaaacgatgtctttgtctcgtttgaaccaggtcatctgtttacgagagtagatacgggaattttgtttgattttcccgatagcgaattccaatgtccattctccatccagatacttgaatatttctttgtatcctacggtattgagcgagttcagatgccggaaaggatatacctgccgggcttcttccaacaagccgtcctgcatcatgatgtccacgcggcggttgatgcggtcatacaattcttcgcggtcgcgagttagtcctatcttgatgatgcggaaagggcgttccttgtgagtgcgggtacgaaaagaagtataagtttttccagtcatgtagcatatttccaatgcatgtattactcgtttgggatttttcagatccactattttgtaatactcggggtccagcagctttagttcggcgcaaagagtgtccagtcctttttgttcgtaacggtgtagcatcagctggcgtgtttcgttgtctacagtggggatatcatctatgcctttgcagatggcatctatatacatcatggaacctccggtcagtattacagtgtcatggttttggtacaggatttccagttgtgctaacacatctgcttcgtattgtgcggcgctgtaataatctgttagttgtaatgttccgacaaagtaatgaggaacacgcgccagttgcttgggagtaggggcggcagttcctatcttcaggtctgcatataattggcgtgaatctgccgagacaatggaagtccggaagtgttcggcaatggaaaggcttagttcggtctttcctacaccggtagggccgataaggacgataagggtgtcaggcatggtgtttataaaaagagaggggcagacgtttaacgtccgcccccgttaagattaatagttttcttgctcataagggtccggtgaggaggcaccgcccatatcaaatccttcgggatcaaagtcttccatatcgaagtcttgatcaccataaaaattctcgtctatatccagatttccgctattgctttttgccatcatttcgtcaaagtcgacggtttgtttaggggcttctccagctttgcgcgaacatactgctttgtcaaggtctttgccggtgatgatttccgatagttcaatgaaaaacactcgttctgccagcgggtcgaatacatacagcaatttttgcttttcgtcttccaccaaatcactcaagcgggtttctctcatgatgtagctgtcttcttccgaactacttcccatatcttccagtgtgatttcttgatctttctcccagtcgtcatcacaaatgaagaaagaggtcatctggtcatctttatatcctgccgctttcaatatcgcttcgtgcaaatcaaagaaagttgcttccgagtctatctttatttctcttataaaatcatcgacttcgtcagagattattgtaaatctgtaaatcatatattttactgtatatactatataacttttttttcgtgcagtaaagttataaaaaactttgttatctgatgatacctctttgagaattttctatgaaagaaataatatattctatttctttgctcataggtatttctttgcgtacttgttccaaggcatcggtaacgttcataccattttgataaataatgcgataggtgttgtgtatattctctattagttcattagagaatccgcggcggcggagtcctacgatattgattcctgcgtaggcgatgggttcgcgccccgctataatataaggaggaatgtccttgctgaaacgtgaaccgccctgtaccattacataaccgcctacccggcagaattggtgcatcaatacggcaccgctgataatggcgttatcatcaatgataatttcacctgccatcttggtggcattgcctatgatgcaaccgctgcctatgatggcatcatgtgctacgtgtaccccttccatcaacaggttgttactgcccactatggttttgcctttagccgctgtaccacgattgatggttacattctcgcgaatggtgttgttatcacctatttcggcagtcgtttcttcaccgcggaatttcaaatcctggggaatagcgcctataacagctcccggaaaaatggtgttgccgttccctatgcgtgagccatacagtatattggcgttaggcatgattgtgttgttatcgccgataactacattcttgtcgataaacacaaaaggaccgatttctacattctcaccaattcttgcctcgggatgtatatatgctaatggactaatcatgttgtttttttagtggttatttattttttactatttgtgccataaactcggcttcgcagactactttctcgcctacaaacacatatcctttcattgtggagatgccccggcggataggagccaacaattcaacacggaacaataaagtgtctcccggcactactttctgacggaacttcactccgtctatcttcatgaagtaggtggagtacctttcgggttcatccactgagttcaaaacaagcagaccgccgcattgtgccatggcctctacttgaagtacaccaggcatgacaggttcctgcggaaaatgtccctggaagaaaggttcgttggctgttacatttttcacaccgacaatgtggttcgcgccgatggcaacgactttgtccaccaactggaacggataacggtgcgggagcagctcgcgaatgcggtttacgtccatgatgggggattcattgcagttataggatggggcctgtatttcgtgaagtttgatttctttgcgtatttggcgggcaaacttgttattaatggtgtgcccaggacgggtggcgatgatacggcctttgatgggcttgcctatcagtgccaagtcaccgatgatatccagtagcttgtgacgtgccggttcgttgtcccataccagagggatatgattgatatagcccagtttggtggcgtccatgtggggaacacccatgacatcggccagcttgtcataattttcttggctcatctctttttcgtaaattacgatggcgttgtccagatcgcctcccttgatcagtccggcacccagcaatggttctatttcgcggacgaatacaaaggtacgcgcggaagctacctcggtggggaatttagccatgtcttccagtgtggcgaactgattggacagtattttagactgataagagatcagtgcgttcacactgaaattttcgtccggaagaacaatgatggaagatccggtttcctcgtccctaaattcgatttttgattttataatatagtaatccttgacagcattctgttcttcgattcctacacgctgtatattttctacatacgctttagcactgccgtccagaatagggaattcgggaccgcttacctgaatcaggcagttgtctataccagctgcataaagagctgccaaagcatgttctactgtacttacttttattccgtttttcatcagcacagtgccgcgggtggtatcacctacattttctgctacggcatcaattattggttgtccttcaagatcaattcgttggattttatacccgtggttgtccggtgcaggattgaatgtcaccgtcaagtttactccggtgtgaaggccttttccatttaaagaaaaactgcctcttaatgtcttctgtttcaacatggggtttatttatttagttgtttttttaattcttctatctctttctgcatggcgttcagtgtggcgtacatttcgggtagttttttgtacacggccgatgatttcatgaaattcttggcgtcgatggccggagtgcctagaatttgctcgttggatttcacgttgccgggaacgcctgcttgtgcgccgatacctaccttgtcacctatcttaatatgtccggctagtcctacttgtccgccaaacatacaccattcacctactttggtagaacctgcaatacccacctgtgatgccatgacagtgtggcttcctacttccacattgtgtgctatctggatcaggttgtccagtttcacccctttatgtacaatggtggcacccatggtggcacgatctacgcaagtattagcaccaatctccacattatcttctatgatggcaatgcctatttgtggaattttttcgtacccttcgggagaaggtgcgaatccgaatccatcagcaccgattacgcagcctgcatgcagggtacagttgtttcctaccaagcagtcgtgatagatagtggcatgtggataaagtgtacaattattacctactttggcatgacttcctacagtagcgtgcggatggagggaagtgttgtccccaatctcagcaccatcgcctacgcaggcaaacggagcgatatatacatccttccccaacttcgcagtgggggcaacgtatgccagcggatctataccggtctttttaggtttgctcatttcatagagcgtcagtaatttagccaggctttcgtaggcgttgtctaccttgattaaggtagcttttacttcttgctcgggaacgaaatctttgtttaccaacacaatggtagactgagtatcgtaaatgtaatgagtatacttaggatttgaaagaaaagaaatcgctcccggcacgccttcctctattttagcaaaagtatgcacagttgcgttttcatcgccaacaataattccctggatgtattccgcaatttgtttagctgagaactccataatactgtctaattctttatgttctaaatgtttcagttttgttacttgcgtgttacatgttagtgtaaacacatcattaattatgcaaattacgcattttttttttatatatccgtacaattcgctaattatttaatgtccgtcgttttcggaacgcaggtaacatatataatatttcttgacttttcgggagaggagagagatgttgagcatatctgaagccttggctatatcacaggtgctgccatctttatagatgatttcaatactgtcatcctcctttttatacatattgttttctatactggatatagataggaagtattttgcttcttttttgttgatattcagttgtttacttatcctcgaaagaatttcttcttttcgcgtttttgtgatagaagaggaggtcacctctactttgaatagtctcctgttaatcattccacggctcagagtggacaataccacatcgctgtgattgctccaaactttcagtgcggtccatatatcattatcatctaattgaataaaattttcaagacaatccgggctgttataaaattcttttttatcaatagagtggtataaaaagaatcttaaagcgggtgaggcgaacagctccacgccacgtaaagctaattcctttgctcgtgtcagagtgttgatcagcattttttcactggcaacggatgtcttgtgcagatatacctgccagtacatcaggcggcgggacatcaggaaattttcgatggagtaaatacctttagactctactaccaggtgatcgtcttttacatcaagcattttgatgatgcgggcggacccgatattgccttcggatacaccggtatagaaactgtcacgccgcaaatagtccaaacgatccatatccaattggccgctgaccagttggtgcaggaatttcttgggatattcatctttgaatatctgtatggcaagattgagttgacctttcatgtccttgtttattcgttccatcagcatcaaggagatttcttcatgtgaaacacctcctaccaatgtgttttccagcacatgggagaagggaccgtgtccgatgtcgtgtaacaggatggcagcttgtacggcttccgcttcgctgtcaaagatgaagttacctttggcggtaaggtgtttgatagtttcactcattaagtggaaagcacctaatgagtgttggaaacgggtatgttgtgctcccggatatacagcagaggacaggcccagttgcttgatgcgggtaagacgttgcagcaatgggtgacatacaatgtcatatagtagccccttcgggatgttgataaacccgaagacggggtcatttataatttttcggtcactcatggggaatgattattcagtgtgctgatatgctaataaaccaatgtactacgctatgtatctacctggtaatttgcatattagcacattgttttattggcacattattttctccatctgtgcctggactttctgagcttcttgtcctgctacagtcgcaaaattctcagttttatccgcatagataatggcacggcttgaattaacaataagtccacaggtactattcatgccatatttgcagacttcctctagagaacctccttgtgcaccgattccaggtacaagcaggaagtggttggggacaattttacggatgtcttcgaaagcacgtccttgtgtggcgcctactacatacatcatgttttcatcgttggcccattcttgtgatttgcgcaatactttttcgaaaaggcgttcgccgttggtgtcttcggtcagctggaagtcgtgggaacccttgttgctggtaagtgctagcaggattacccatttgccttcgtaactcaggaagggagtcacgctgtcttcacccatgtaaggagctacggtgactgagtcaatgtccagctcttcaaagaatgtgcgggcatacatagccgaagtgtttccaatatcgccacgttttgcatcggcaatgatgaattggtcgggatagttttccttgatgtaggatacagtcttttcgaaagcgatccatccttttacgcccatgctttcataaaaggccagattgggtttataggcgatgcaataaggggcagtagcgtcaatgatagctttattgaaggcgaaaatcgggtcttcttcttttaacagatgttcgggaattttctttatgtcggtatctagccctacacagaggaatgattttttcttttggatattttcaaataattgttgcttgttcattattatatttacagtttatggtttacgatattttaattataattcgctctctttcaaacgttctgcattctcggctacagtcaaatggtcgatacagtcttgaatgtctccatccataaaggcggccaaattgtaaatggtatagttgatgcggtggtcggtgatacgtccttgtggataattgtaggtacgtatttttgccgatctgtctccggtagataccatcgttttgcgtttgctggcaatgtcgtcaatgtacttttggtgttctttatcatatataaaggtacgcaggcgagaaagggctcgttctttattcttcggctggtcacgggtttcggtacattctatcaggatttcctctactatcccggtgttgggattcttccagttgtagcgcaggcgtactccggattccaccttatttacgttctgtccgccggcaccaccgcttcggaaagtgtcccacttgatttccccttcgttgatttccacatcaaaaggctctgcttcgggtaaaacggcgactgatgcggctgaagtatgtacacgtccttgggtttcggtggctggtacacgttgtacacgatgtacgcccgattcatatttcaaagtgccatatactttatctccggttacggagcagataatttccttaaaacctcctgctgctccttcattggcgctggatacttccagtttccaaccttttgtctcgcagtatttggagtacatacggaacaggtcacctgcaaaaatggcggcttcatcacctcccgtaccgccgcgtatttccagaatagcatttcggtcatcttgcggatccgcaggaacgagtagtagtttgatttcctcttccagttctggaatgcggacttcgcagagatttgcctcttcgcgtgccatttctttcatctccgggtcggattcgttagtcatgatttgtttggcctcttccagtccattcaggcattgtatatattctctacgggctttcatgatgtcattcaagtccttgtattccttggtgagcttgacataacgtttttggtcagctatgacattagggtctgtaatgagggtggaaacttcctcaaagcgagccactaacccgtctaatttctcaagtaatgtattattgttttctgccattcttttctaaacatttatttgcgacataccaagtgagtaatatccacccaagtatggcaagtacttttcttactatatatagtatgtcatgccaagttgtttcatgaccccatgcggtagagatgaaatacaactcgcgtattgtatcaattgtaactaatgagcatattattgctcccatgccataaaaaaatcttttttttaatgtagcatgcttggaagcgttattataatattgcttgtcagtatttgaattctccaaactcacttttgataattagttccttcttgtcactttcttctatacgtcccacaatcttcgcgtcaatattgaatgacttgctgatggcgatcacctcttcggcatgttcgggtgagaggtaaacttccaggcggtggcccatattaaatactttgtacatttcttcccaatcggtgccgctttgttccttgatggttttgaacagaggggggacagggaacaggttgtcctttactacacggcaattgtttcctataaagtgcaggactttggtttgagcaccgcctgagcagtgaaccattccgtgaatttcaggtcggagcgcatccagtaatttcttcactaccggagcataggtacgggtaggtgagagtaccagctttcctgcatccagcggacttccttctacagtatcggtcagcttcgaattgccactgtatactagttcttcaggtactgccttgtcatagctttcgggatatttctcagccaagtattttgcgaacacgtcgtggcgggcgctggtgagtccattgctgcccatgcctccgttgtattctttttcataagtagcctgtccgtaagatgccagacctatgatgacgtcacccgggcgaatattggcattgttaatgacatcggtacgtttcatgcggcatgttacggtagaatctacgatgatggtacgaaccaagtcacctacatcagcagtctcgcctccagtagcgtatacgcctacacccatttcgcgaagttcggccaacagttcatccgttccgttgatgatagcggaaattacttcacccggaacgagtagcttattacggccgatagttgatgaaaccagaatattatctactgcacctacacacaacaagtcatcgatgttcataatcagtgcatcttgtgcaatgcctttccatacgcttaaatcgccggtttctttccaatacaaataagccagtgatgatttggtgcctgcaccatcagcgtgcataatgttgcaatattcaggatctccgcctagaatatcggggatgattttacaaaaagcttgtggaaaaatacctttgtcaatgttcttaatggcgttgtgcacatcttccttggatgctgacacaccgcgctgcatgtatcgttgattgctcatgagttatatattttattcaattgaatgtgcaaaaatagttattattttgcttatagccttgagttttatgaaaataaaagaggagaagagatttattctgtttccatattattgccgttcctgttttagatttattgctatactcttattttttagacgagtaaatttaatatttatatcgaactgacattaatatcatacattatttatatgttacaatgccttatcaatataacgccataaagaaagacgcatagtacaaccacctctatcaatatcaaatatcttaaagactataaaagaaaacacagcctaatttaacgtgaaatataaaatttccccgtcacttcatcgtcttcattaccagtatgttccggtgtgaaaatatctataaaggccccgaaacggtaggtaatcgcggtcaatgtacaacattgcgatcatcgcacccatagcggcaaaattccaacagatgtaccttgccggcagtatgttaccatgaaaacagctttatggctttattgcttcacctgtgtgaagcggcggtttcacacaggtgacaacggctcttcacccgaatgacagggcctgttcacctgagtgatggtacagatggtgcactcttcttgcacggatactgccgtaaatatatcaagattatgtatccaatatgacaaccggcatctgacgagctggcttccgcaaggaaaaacgaaaaaaacactttgtggggatacagaaaattacgtcaccatatatcgctgtatatcagcataatgcggtgacgggacaaaaaacattgcagtgcggaaacgaaaaataacagtatgtaaagttttatcagattataacttaacaacaaagatggagattcccggcagacaaactttttgagagccgggcatctgcaacgacataatgtgtcataccaaaaaaacagtttgcattttttattttacgattgttccgacaaaggtttgtgctcctgcattattcaagatatatactgtatagaatccgccaggtaatgaggctatggacatttggggtgcataaacaaaatattttatttcttcaccggtagcagtaaatattttcactgtttttgcttcttttatttcaggcagggtgagaatatctccgtcatttagtaaaggcatgtccgtttctgaaattgcattcagttccaagggagcgctttcgtttccgaaacggtcggcagcagttacggcaaaataacgtttttgtcgccaaggtgaaataggggtatattcgtattccgtatgggtgagataggtttccagtaagtttccggcatctgtgatatctactggataggtatctgaggcataaagatgataggtgacaagacctccgttgttatctgtggaaatctgccagctcatgtgcatttttccgtccggcaacagttgcagggaaggcatggccggagtggatggggggatgctgtccatccaggtcattgggggaatcaatgccggagtggtatagaaattctcttggagttcgtcccaaatgcctttggtgttgtttaatagaaaacgattgcggaaataggcttgtccgtttagttttatctgacgggtgaaataaagttggcggactatttcgtccaacggccaattttgttcgttgggagagaggaaataaatgcccaaaccaggtattatccagcggttaccacaattctctttccaatccaatgcaaaaggatagaaattatttccctgaaaatacatcatcgggaacaatgcatcatgaataccttcttttagccatttctgagcatcttggtaaactacatgataagcgttccatccacgggaggggtatcggttggtatctcggtatttgccaataggggaactgctgactttcacccagggtttgatagtcttgatgtcggtatagagcctatgcacaatatctgtgatattatcacgccgccattgtttcaactccttacctttaccgtatttccggtaggtgtccttgtcaggaaagttatcggcttgctcggggtagcggatgtaatcgaaatgaatgccgtctatatcataacgggaagttatttcttttactatgcatgacagatattctttggttcccggatttcccgggtccaagtaccagttacctttataaagtttgcaaattgtccggtttttccgtactacggagctacgtccttgcaattgtacttgacgggtatttccggcaggaatcgtaacaatccatgcatgtagttccatgcctcgtttgtggcattctccgatggcgaaagccaaagggtcatatccgggattccctcctgtgctacctgtcagtgattcggcgaaagtttctatggcggaaggataaatcatatctccgcgcagacgggtttgcaacaataccgtattgaaattggcggctttcagacgatccagtatatcacataattctttttgctgacgccggatgcctgatgcgtttattgccttgttacgaggccagtccattcctccaagcgtagtgagccaggtggcacggatttcatatttaggttgtgagaaaactgataagaaactcactatgactagtaataaagttataaagaatgttcgcatttactttaattttagggcaaagatacgaagtaatcaattaattcgttacttttgccccaacaaaacaaaaaatagaatatgataacctttattattgcattattggttcttgtaggcggatactttttgtatggaagttatgtggaacgtgtgttcggtcctgacaagattaggaagacacctgccctgaccatggcggatggtgttgactttattccacttcctacttggaagatttttatgattcaatttttgaatatagccggcttaggacctattttcggtgctataatgggagcgaagtttggtacggcgtcttatttgtggattgttttaggtaccatttttgccggggcggtacacgattatttgtccggaatgctttccattcggcatgagggcgagagtttgccggaaattatcggtcgttatttagggcttcccacaaagcagttaatgcgtggttttacggttgtgctgatgatattagtcggagcggtttttgtggcaggaccagccggattgcttgccaaacttactccggagtatatggatgttactttttggattattgttgtgtttttctattatatgttggctacattgttgccggtagataagattataggaaaaatatatccattgtttgccattgctttattgtttatggcagtggggattttggtgatgttgttatggaatcatccggcattgcccgaaattacggacgggctgcataatacccatcctgccggattaccaatttttcctataatgtttgtttctattgcttgtggggcaatcagtggctttcatgccacacaatctccactgatggcacgttgtatgaagaatgagaagtatggtcgtcctattttttatggagcgatggtgaccgaagggatagtggcattgatttgggctgctgccgctacttatttttttcatcaaaatggtatggaggagagtaatgcttcgattattgtggacagcataaccaaggaatggttgggtacgataggaggtttattggctgtactgggggtaattgccgctcctattaccagtggagataccgctttgcgttcagctcgtttgattgttgccgattttatgcatttggaacaaaaaagtatagcgaaacgtttattgatttgtattcctatttttgcggtaactatcggtatattattgtacagtcagcgtgatgcggcgggatttgatatgatatggcgttattttgcctggtgtaatcaggctttgtctgtgtttactttgtgggcggtcactgtttttctagtacgtgcgaaaaagaattattatatcaccttgtttcctgccctgtttatgacggctgtatgttctacttatatttgcatagcccccgaaggattagcgttttcggattatgtatcttatataattggtagtctttgtacgttggtagccgctatagggtttgcaagttggtataggaaacaaaacagcatagtttatgaaaaaatatagaaaatcgatttggttgcctgtagctttattggtctatactacagcgatggccgtttattttattccgcgcaatacggaaataagtgatacggaaaagtatctcacagtaggtttatcctatatgattatagcgttgttatggattgtccttcgtaagaaagaaaaggcggaggaaagacgtgaacgtgatttggaaaacaaaaaataactattaaacgacaacattatgaagaaaattttagtcagcttgatgctgttggtaatgactgcactgagtgcacatgctcaatttgagaaggatgtatggtatgtgaatgcttcattgacagggcttgacctatctcatagcaagaatgaaggaacaaattttggttttgctttaaccggcggcgcatttgtagccgataatgtggctgtgttgctgaattttaaaggcaattatgtagaacatggaatggatgaaaccagtattggtgcacagggacgttattatttttccagttgcggtatttatggaggactaggaatggcgtataaacacctttcttgtgtaggatttaaaaagaatctggtttgtttgacaccggaagtcggatatgcttttttcttgggtagaaatgtgactattgaaccgtctgtatattatgacttgagttttagtgatacttcagaatttagtaaattaggattcaagataggattcggggtttatttctgattgatttaattccaccacagattacgcagattattgaatgggagaattcattgaaattcaatctatgtaaatctgtataatctgtggtgaaaaactttttatgtaagattaatgcgcatagagatgcgtgaacggaatttctttaccatcactccctgttacttttaatttcagttgtcctccgttctggtcgaaataacgtaattccattggatgatatccttttgccaatgctttttgccccactatttctttaggcccgtgaggtccgtcattgtctactatctgttcactgtctatagttaatgtactaccatcatcggataggagtgcaaaagtgtagatatcgtcttgaggagcattgaaatatcctttgataatcagtccgatatttccttttacttttttaggaatcataacatcttccactggataagtaccattgaccggagctttttctatttcactgcatttatttcctttaaattcgtgccatgtagctttcaaacccggattggaaggagcggcagttacagagggagtatattcacttttgatgaaacgggtcttgactatgtcacctttctttccattagggcggaaggtgcagaaagtaaagtctgtggtttcagtcactttgatgggaccttcatatatgggagattgtaaagtaggagtactgccatcagtggtatagtgaatttccgcagtggggtcaaggcaagttacattgatggctccttcaccgataaaggcgttgacggcattaaagccttccaaatcgggtatacggtaattgatacccatgatattgagacgttcaaactgatcagacaggcgttgttggaaggcactccaatctttttgctccggtttgctccaacctagttcggcaatagccagcaaacgtggaatggccatatattgcatacgtgcgttggaaggaatccattcgcaccaaatatttccctgcactcctaaaatcagcgactgctgctcggaggtcaggttgtctgtcgtatccagattataaatacttgccatagagttcttatcttctgcataatccaaataaaattgtccgttaggagtgaaaatgacagggttgccttgtgctgttgtcttggttgctgcatcttttacccagctgcgccaccacattacggtagctgttttagacaatccgccttcaatgatttcatcccagcctatcatttctttgcctttctcgttaaagaatctctccatgtcatgaatgaaccatgattgcagttcttcttcagttttcagattattgtcatgcatacgtttctgacagtccggacattttttccaattagttttttctacttcgtcacctcctatatgtacatacttataggggaaaagggctatcagttctgtataaatattcttgcagaattccaatgcggagtctttccccggacaaacaggtgaggagaagacgcttccccaaccggtttcgttaaaacaggaaacaccttcatagttacttacagctgccagcatgtgtcccggcatatcaatttcgggaataatatctatgcctcgtattttggcgtatgctatgacatccttgatatcttcctgagtgtagtagcctccatataaggtgtcaccttttacgatgcgtatcttgtcttcaggaattgccatatccgggttgttattagtctttgactgacgtatgcattcgcgatcatgagaattgaatttgcgccatgctcctttttccgtcagtaaaggatatttcttgatttcaatacgccatccttggtcgtcggtaagatgccagtggaatttattcatcttgtaaagggccatgacatccagtaattctttcacctcacctattgtgtagaaatggcgggatacgtccagcataatgcctctccattcaaagcggggggcatcttgaatgttaacggccggtatggcccagtctgtacctttaacaatttccttagattctatttgcgggggaaacagctgtctgagtgattcgatacctgcaatgacacctccgtaagagttacctgtaatgttgaccttatcgctctcggctgtcagggtataagctccttcttttccttgaacatcacccaaggcaagggtgatggttccttcgccttctttgactttaaggtcgtagcctgtggctctggaaagcatatcggccaaatactcggctgcgggaattagttcggcgtcaataacaccgatggaggtattacttttcaatacaaaagcaccgtttgtttcctccagatggttggttatgggtacaatggatacctcttttgttacagggggagtaccggtacatgctcccaacatcaatgtgcctgctaacatacaggcggtcattaactgtttatgtgtacatttggtcataggataataaattaggttattggacaaagataacagaaatattgggaaaaacgatattatttggcgggatattggaaagtaaccagtactcctttatggtctgtaggccatacgcccaatggttctataaacttgtctttagatgtttcctgaacacgctgtgcacggactatagaatttttcggaccgaaaatggcggcgtctttcactttcaaccccttttcgggataataccaaatgtaatctatacggtcgcgttcatctgctttgggagcccaggttattttgtcggcgggctttgccggattatccgaaggataagtgaagccgggatagtttaatacatctggatagaattctcgataggcgtctttcaatccggcttcgtctaacaggacaggaactgtccaggggattacaaagccatgatggtcatacaggtctttggtctcttcagtccaatcttgatgtgaaggttcattaaaatctcctcctaaaatgatggtgtagccggctgcacgatctttttttgcctgttcaatgaatagtctgatggcgtcatcgcgttgtgaggctacatttctctttaatacttcttctacggtagtggggatagggatttcttcccaagtagaaccatcatatccgcgtacattataataggcgtcatccaaataatcaagatgagcggtgtagactgctattttctgtccgttcatatcggctgtaaggcgatagatactgccgtggtcattcttttcggggaaaacggttaatgaatcagtgatggggtatcggcttaacagacctgtatcataggtatagaaggaataataggtttctcctttttcctttaatgattgcactaggcgggcagtgaaattggtgttttcgtaattacgtacttcgctcaatgtgacgaagtccggacgaagacgggctatttcattcacaatagcgtcgtaaccaccgggaattacagttccttcttgccaaatgttccattgaagaacggtgaattctttctctttttgtgaacatcccaataggaaagggaacagcaagagtagtaaaaaaagttttttcatattctgttgatttataaggttattaattcaattctaaatttactcatattttcgtttagatttagattgacaatgcggaaaacattaaaacagatttttagtaaaatgattctgcaatcataccacaaaatgctaaatttacagaacggaataaatcacttttaaattcccatttatcatctagtggtatattgcgtataatcatatttaataatttgtgtcagtttggacaatcagcggtgaataaaaaatcaatcaggagaatccatcgccagtttttccttcaaaaactgtcccgtataagatgccgcacatgctgcaacctcttccggagtgcccgcaactaccagatttcctcccatatttcctccttcgggccctaggtcaatcacatggtcggcacattttatcacatccatattatgctcgataatgataatggtatgtccgcggctgattaaggcttcaaatgcttccagcagtttcttgatatcatgaaaatgtagacctgtggttggttcatcgaatacaaaaatagtgggttgtgctttctctatgctcagaaaataggctagttttacgcgttgattctcgccaccggaaagagtggaggaggcttgtcccaactttatatatcccaatcccacttcttgtaatggggttagttttttcactatctttttttgattgtattcggtgaagaattcgatagcttgattcactgtcatttccagaatatcatagatgttcttatcttgaaattttacttccagtgtgtcgctcttgaaacgttttccatgacaagattcacattctaataccaaatctgccataaattgcatttcaacggttaccgtaccgtcacctttacattcctcacaacgaccgccttcggtattgaatgagaaatatccggcagtatatcccatttgtttggcaagaggctgttcggcaaagagtttgcgtatttcgtcgtatgcttttacataggtcaccggattgctgcgtgatgattttccgataggattctggtctacaaattcaatatctttcactagctgtacatccccttccaaagagatgaactcacccggccgttcgctagcttcactatattcgcgtttcaatgccttgtaaaagacatcacgtaccaacgtactctttcccgaaccgctgacccccgtaactaccgtcattacattcagtggaaattttacgtcaatgcctttaaggttgttttcacgtgcaccttttatttctatataattgttccacggacgatggcatcgggggatctctatgttttcttctcccaacaaatagcgtaccgtataactattactgtttctttgaagatcgttcatgctgccttgatatactatctgtcctcctaaacgtcctgcttgaggaccgatatcaatgatataatcggcagcacggattatttcttcatcatgttctaccactactacggtgtttcccagttcctgtaactgacgaagtacttttatcagccggtcagtgtcacggctgtgtaatccgatactgggttcgtctagaatatagagtgagcctaccaagctgctgcctaatgaggtggccagattgatgcgctgactttcgccgccggagagtgagttgctgagacggttcagtgtaagatatcccaaacctacatccatgaggaagttgatgcggttggtaatttccgttaagatccgtttggcgatggctgtatcatgtgcatctagttctagagtgcggaagaattcttttaagtcatgaataggtaagtcaaccagttgagaaatggattttccacctacttttacataaccggcttcttttttcaagcgtgttccatggcagacaggacaaatagtttttccccggtatcgtgccagcatcacacgatattgtattttatattgattttcttccagcattctgaagaaagaatctatacaggccttatttctagggccatgccataaataatctttttgttcctgtgtcagttcataataaggggcaaagatgggaaaatcgtgggcgggagcttcatgaatgaattcttgtaaccattcccccatcttttctccgcgccagcagaggacagctccgtcatatacactcagagcacggtttggaatcaccagatgttcatctatacctatcactttaccgaagccttcgcattcgggacaagctccgagaggggaattgaatgaaaacatttggtcattcggttcttcgaatttaattccgtcggcttcgaatttagtgctgaaagagaatagctgcgtacttccgtcagcagagtagaagcggaggaggcaatttccgtctccctcgtacatggctgtttcggcagaatcggtgaggcggctgatactgtctttgctatcatcggctgtcatgcgatctaccagcagatagatgttttgtcttttatcttcggcagctgtttgttgcagaaaatcttctatacgaactatttcacggttaacctctacacgggtgaatccttgtttaaagtccatttctagctgttgacgcagtgtacggccttcacggggcatcataggagtgagaaccgtgtatttcgttcctttaggaaaggagagcatacagcttacaatatcttcaatactatgctttttcaccagttgcccgctaatgggagaataagtcttccccacgcgtgcatagagtagtcgcagatactcatatatttcggtggaagtccccacggtggaacgtggattgcggctgttcactttttgctctatggcgatagcgggtggtatacctttaatgaaatcacactcaggtttgctcatacggcccagaaattggcgggcgtatgatgacaggctttctacatagcgtcgctgaccttcagcgtataatgtatcaaaagccaatgatgattttccggaaccggataggcccgtgataacgaccagcttattgcgtggtatgttgacatcgatgtttttgaggttgtttacctttgctccttttatggatatatagttactttctgacattctttattgaatttggtttaatatgcaaagataattataagttttcttatctttgcaagcgtattaaacaagaataacaaaatgagagcaaaaactattcttcttttattgatagcactactttttacttctgttgtcagtgctcagacacgttatcctaaacgtgagttccgcggtgcatggattcagtgtgtgaatggacagttccaagggatgccggcagagaagatgcagcagctattaataaatcaactaaacagtctgcaaggcgcaggcattaatgcgataatttttcaggtacgtgcagaagccgatgccttgtataaatcttcttatgagccgtggagccgctttcttacgggagtgcagggtagagtgccttcaccttattgggacccgatgcagttcatgattgatgaatgccataagcgtggaatggagttccatgcctggattaacccttaccgtgccaagacaaagggaactactgccttatcacccattcatccgtataataagaatccggaacgtttcgtgaattatgctggtcagctttattttgatccggctttgcccgaaaaccgaaaatatatttgtaagattgtgcgcgatattgttactcgttatgatgtggatgccattcatatggatgattatttttatccttatcccaacccgggcgaggattttcctgatcatgtcagttttgcgcaatatggtcgcggatacagtaataaagccgattggcgccgtgacaacgtgaatgtgctgataaaggaaatccatgagacagtgcgcgagtgtaagccgtgggtgaagttcggtgtttctccttttggtatctatcgtaacaagaaaaatgatccgaatggaagtgatacacgtggtcttcagaattatgatgatttatatgcagatgtgctgatgtggattaataatggttgggtagattataatatccctcagatttattgggaaataggtcatcctgctgccgattatgacaacttgatacattggtgggcaaaacatgccgcttcgcgtccgttatttatcggtcaggatgtgatgcgtacggtgaacaaggcggatgcccgtaatccattacaaaaccagatgcctgccaaaatgaagttgcaacggtcgcttcctaccgtgcagggaagttgtcaatggtatgctgcagcagtggtggataacgccggtaattaccgcactatgttggagaaggagtatcatcgttatccggctttgattcctgaatctccttttatggacgataaggctccaggtaaagtaaagaaggtaaagatggtatggacgtatgaaggtccagtactcttctggacagctccgaaggcaaaggacgagatggacaaagctgtacagtatgtggtttatcgctttgataaaaaagaaaaagtcaatttggatgatgcttcccatattgtagccattacccgtgatcatttttatccattaccttataacgatggaaaaacgaagtaccagtatgtggtgacagcgttggatcgtttgcacaatgagtcgaaaggtactaaaaagaaagtgaaactgtaagaagcgggagtgtttcttttagattttatttctactgccactgcctgggtatttattcatgtaatatcgatgaataaagaattctagggtagtggcagttgatttgtatgctgccatatcttccgagtacgatattgtttatgttgagatcaatgaaaaaaggttataacatctgcatccatcttatggctttctctaatcagtgataaaaagtatctgcaataaatatatcaagtagtgatataaattctattgatctcttgaatttatttccgtcatatataaagtcccgttggcaaaattgatttttttcagattgtgttatgaaacttaagaagctttaccaacggggaatgtatttataatttcacattgacttgtttccctttataggaaatagattggtcaaaggtggggctatccttatctccacatcctttccccggttcaacaagtatgatgttgaatttgcggtttttcagcatacctttgtagttgccttttcgctcgttaatagtcagtgtgcgctctttgtcatcccatttcatcaggatggttgtgtaagcacctttttcataattataattatcaaattcatcttcataaagggtaaattccgcatcagcacccggatagatgcgaatcgtcagattatcccacttcttttctgtagagtattgcactgctggtccccaaggaaggatagatcccgcacgtacataaataggcataatatcaatgggtacttcccgttggatcgtttgcccgccttccaaagtttgcccggtccaaaagtctgtccagtttgctcctttaggtaaatatacctctgtatttccaatcttttttaaatcttttaagtaaccgttctgatttttgtcttgccatgtataaagcgagtctgtaacgggacgtactaggaaattatgtccgaacatatattcggtatccatatcaagtactttgggatctttcgggaaatccatcattaatgggcggataaagctgcctgctttgctggttacctcccaggaagtgctataaagataaggtagcagacgataacgcaggtgagtatatttttctaacgcatcataggcccagtcgcctttttggccgaattggtatatttcgactgctaccggactagaattgtgtgagcgcataatgggttgaaacactccccattgataccagcggacatgtaactcgtgataagctatgttgtttacattattattgtatttccaggcaaagaatcctcccaaatctgtattccaatagggaatgccgcataatgagtaattcaatccggctgctaattgtttgcgcatgacttcccaggtagaaactacatctccgctccacgaatgagaagcatagcgttgctgtcctaggaaagaagaacgagtgagtaggaatactcgtttgtccgaagtagtagctcgttgatgttcatatactcctttattggacattaacgggaaagcattatgtactctgcggaaagttcccaaataggtgagagtattaaaatcctggtccttcagattcatgtgatcgggttcagtagagtccagccaccaaccgtccatgcccagatcgaatatgttctttttcatctctgaccaatagagatcacgtgcaacaggattataagggtcgtatggcctgactccggcattgttgggccaagtatcaaattgaagaagtgctttcagactgtccattttttgatacatttcagtccaagggccgaaagaagcccatacggagatcatgatatgtgcattttgtttgtgcacatagtcaatcatttctttgggagttttgattcttggagtaccgtaacgtgcgcttttatcttctccgtttggaagatatttcatatattctttatcgcccattttgttgatgtaacggggattttggaacttcatggcattccagttagagtcgcatccccaatattgccaatcctgtataatgccatccagagggactttcagtttacggtacttatctacaacttcgcataattcatccgggcttttataacgttcgcgacattgccagaatcctagtgcccaaagcggatagagaggagcctgtccagtcagttcgcgtacattggctattactttatctgcattgccgccgtaaatgaaataataatctgcacaatcacctacttccgagtcaaaagacatttcttgtggattgtctacaaaagtggtgggggagtaattgtcccaataaagggcatatccttttattgaatgaataaacggaatgcaaatgctcatgttttggttacggagaaatagtttctgattccgttggttcacttttcctgtttgttgctgtcctagtccgtaaatcacttcatctttgtccagtaagaaagcttgacgaacattatatgatggaacgccggcgtcatcgaagggggtgaattgggtaccataatctttatcagtcagtaataattttccttctttgtcggaaaaacggatacctccggtttcaggatttacttctacttgtataacattgctgctgagtgttacatttttccctttctcaccgaaagttacagaggtggtttccggtgttttgataatgaccagactttcttttttataaggtttcttaatgggggttttataaatacggacaatggtgggagagtaaaattctactttgacatctatttcttgtgtagtatacgttattccttgtgtggtgtgttgtacactctgtgcgatgccatttgttgcaatgatagttgctccaattagggttagagtcatttttttaataaaattcatattcatagtattttagtgttttgtactgttacaaaggtaaggcgaaaagctttaaataggcaacaatgaggttgaatccaataataatcaggttgatttctttgtttttctggcgtattcggaggggcggcatccatacatttcttggaagcacttacttagatagctggaactgctgaagcctgtgcgttctgctatttctgcaatactgagttcgttttcagtaagtagttgcgcagctcgttgtaaacggatgttacggatgaaaaggctgggagactgatctaataaatttactagtttgcgataaagtcctgttctttccatgcaaaggtctcgacttagctgttctactgaataaccgatgacatgcatattcttttctacctgttctatagcccgtgctaaaaaagcggattcggtattggttgttttaggatgatccggttgcttgtcgttttcaaagcaagtggaggttgctgtgccgttcttttccagacgtgctttttgttcggcttcgtaattgttgcattgctctatcaggttgcggatgcggagtagtagaatttcctctttatgccgacgctctattttttttcgggtccaacatatgtaaagacggatacttcctactgtaataaatagtaaaatgagcaggtaaatagtataagcggtggttgttttccaccaaggggcatggatggtgagttttataacggttattttttcattccactggagaggggtatcggatgccataactttgaatgtgtattctccgggaggtaaattagtataggacgcttgaagcataccattacctgctgtggtattgcctggtttgctggtgaaaacattcatccagtttttatcaataccttctaattgataacgataataggtgcgttcactattgatatagttcaaagcagagaattcgaaagtgaggaaattctgattgtagcccagttctatttcttttgtataagggctggcttggggaagttttatctttttgccgtatagccgcaaacaagtgaacactggggaataggggagttccggagtgattgattcattatcaggattgaagatattgaatccgtctatgccaccgaagtaaagtgtaccgtccgatgctttgaaaacagcctttgttagatattccccttctaatgcgccatcctgttgattgaaattggtgaagtatggttctttatttttctgattgatgtggatacgtgagattccattgcttgtagttacccagatatcattgtgatcatcttcaataatgccttgtacaaagttattacttaatccattttcacgataaaaaatgcgtggggtttgctcgtccggtataaaaagttccagaccatctgctgtccctgcccaagtccagcctcgtgtgtcagtacatagggccgtatatgtttttcccttgaaaaaggcagtttctgttcctctgttgaatttcttttttacttcggcagggatagatgaattatgttcggagataagggtgcgtgttccatctttttcagtggacaagcggtaaatatgagtatgttctttcagatagatcattcctttattgtcttcggcaaaactttctactgcaatatctttttcaggagcaactggaaaattgttacggtttatttgggtaagtttatgcatggacggatggtaatatagtaatcctcggttgagagttccaatccataatcctccttgtcggtcttggaatatagtgctgatttctgttgagagtcgttgtccgtttttagtttccaaaataggaatatattgcagtttttccttagtaagatccagtatccaaaaaccatgtacacaggttatatacgctttttgattgtcgggggtgatgattaaagtattaagtgcatagttttcttcaagtatctttttccatgtccgttggcatgtgttgaaacagaacaaaccacctttatatccgttgcgtaattggtaaaagctgtttggagctttgacaaccaaggaggttcgggcaaaatattgttgctcggtttccgcataggcagcagcactgtatagtcgttttctgcttgtcatgtcataacaatctacttctcccgtattatagaacaggtaaagtgaatcattctccgtatttagatcttgtagttggcgggtatcattgggggataaagttatatggattccggtttgtaattcttgtaatttatggtctgtcagtatccaaatgtgtcctgcacagtcggcaaaaagattttctatcggttccggtatatttttattttggaaataagattctaaatctcggatatattcctctttgtagagattgattcccattagtttgtgatagtctttcacccaaagtagggagtctccactttgataaatgcggtagaacccgtcatattgttttaaaggatatacatttttatccgtccgatgcagataactgaaatgtataccatcatataaattgatgttgccattagtagtaaacaccattcttccgtcaggtagttgtaggatatatcttatctggttgtcgcttaatccgtgtgaagtattgatggaagtaaacaggaaatcattggcatatagtggcaatattatactgatatataaacagatcagtaggcttatttgttttttttgatgatttcccataatcttcctatttttagtaaagcaggaatcctgccactccgcaaagtataatcattaatataggattaattttgtatttccgtgtacctataaaggttactagaaaaataattatactgatgataaattgatacaaatctatttgatagctactgaagttttcagcattcatcaagacgagtgcagccgctgccagcagacctaccactgccggacgcaaccctttgaatacggcttctacaaccggatgcttttggtatttcaagaagaaccggctgatgattaccattaatatgaatgatggaaaaactacagcaaaagtagctatacaagaaccgaatatggcccagttttcattgtagcctgcattcaatactgcagtatatcccacataagtagcagagttgataccaatggggcctggtgtcatctggctgatagcgatgatatctgtaaattcgctggcactgacccaattatatcttgttactacttctccttgtatcatggacaacatggcatagcctcctccgaaaccgaagagacctattttacagaatgtatagaataaatatagaaaaatcatttggatgaatatttatgtttgtacttgccatatataaaaccccccacgcccgctattatgataatgtagacaggggatacgtccaatacccagataagtaatgcggatactattggtatccagatagtgtaacggtttatcttggccgattttgccatggagaaagttggagctgcaataagggctactactgccggacggattcccttgaatatattctctacaatttggtattgtttgaactgttgaaagaataaggcaattgccaacataataaagaaagaggggagtattgtgcctaaagccattgccaatgctccacggaaattacgcaatttatatccgataaatatggcaatatttacagcaaatattccaggtacagactgagcgagggctaataaatcaataaaatcctctttgtcaatccattttcgtttgtccactatttcatcttgaattaggggaaccatggcatatcctccgccaatggtaaatagtcctatctttaagaagataagaaatgattgtaaatagaaattcatttttttaattttgtttcatataagtgcttggtggaactctgtagtatttcttaaatgtatccgtaaaatatttgggatcactgaatcccatcatatccgaaacttcggatacagtataacgtttgctttttaataaaatgctagcctcgttcatacgtactttacgtataaaatcactgggcgaatcattggttaaagcctttattttattgtataaactactccggctcatattcattgcatcacataggttttctacgttcatttctttgtttatactactttttatgatgttggtggcttttaaaagaaattcttgttccaaactgatcgtcggatcatctgaaacctcgtctgcattgaatttgaattgtgagaaacgctttttcatgatttccctgttcgccagaacattggctatatttgctttcagtacttccatgtcaaatggtttgactatatatttatcggctttggtctgtaaacccttgatgatactttctttatcgttcaatgcggtcagcaatatgataggtatatgactggtttcaatattatttttcaatatattgcacattttgtctccattcatgataggcatcattacatccgacaatatcagatccggttgtcgttccttgataaaatccagtgcttcttgcccatttcctacatcagaaacattatagtcttccgatagcgtatgcaacaggaaagtacgcaattccatattatcttccactatcagaatggaagcggcatgtgttttggctggcttgtttttgatctctttcaccagttcttccggattgccttcgataacaggcagaggatcaattacatcagcttttttgaatatacggtagttgtatttccggcttttgatagggaatgccagtttgaaggtagttcctacattttctatactgctcattgatattttgccggcatggcttttgatcagtttgtaggtaagcagcataccgatgccgcttcctgtgatttgcagattgatggcattatttcctctgaagaggcttttgaacattttcttttgttcattggcagggattccgattcctgtatctgtaatagtgatgaaccaatgacttttatttttctgagtttgtacagtgacattgcccccttgacaggtatatttcaaggcatttgtcatcaggttacggatgatggaatccatcttatttctgtccagccatacttcctggctttcaaaattagtttcaaatattatatttatctgtcttttgcgagcatataaattgaactgttccaaatagtttttgatataattgttcaattcgtatcgggatacatatacagtggaggtatatagttcctctttttcaaaattaatcagattactggctaactcagacaggttgtccgtattttgtatagctaggttgatattgattcttccctgttcggataggttttcgtttttaaggatctctcccaaaggagcttttatcaaagtcagcggtgtacgtatatcatgtgccgtgttgataaagaaccggattttttcttttgaattgtttctgtctttcctaagccacaaataacgcaaaacaattactccgaccagtataaaaatgatcagataaagaattcctgcccaaaaagtagcccaccaaggtggggttatggtaatgaaaagtgaacgttcttctaacaaatggtggtcatccatcaggatggctctcactcttaatttatatttaccgggactgatgttagtgtaacgtatgcggttatcattcgtgagtgaagtccattcatcataaaatccttccagtttccaagaatagactatgttggagggattatcataattaatggaagacacatccagtgaaaaaatattctggtcgtaattcagtatgatgtgccgggtatcatcaatttcttcttttaagggggaacctttttcaccaggcattactttctggtagagcagtcggaaattgtcaaataccattttggatttaaattgatgaggcagcgtgacagtatctgccagttcaatggctccgtctccacatccgaagataaattttttatcgcgtgtatgtactccggcagcttggttaaagctggtagacatcaagccttgttcttttgtccagttagagaatattttttcttttgttttgaaacgggtcaaccctttttctgtactaatgattaaatcgtcttccagagcaggcagtatgcaatgaatattattagatatcagagctgaattattgatatggtaattagttactttttctgtataattattgtaaatccacataccggaaccatgtgtaccaataaaagtgatgttctttttactttgataaatagtatttatacagcctagctcggagtctagattcaccgctttgagctcttgattgaccttattgaactgatacaatccattgatagttcctatccataaattatgggcgtccttattggtgatataggtgatagggaagtccatattgtaacaatgcatttcctttgtatccagatcgtaacttttcaagttgtaatatcctccggcccaaatcagattatcccaatccttataaatacaacgaatatatttatccggttttacggtgtcatcattcaatgtttggggaataaaatattgtgtggtcatgtttttcttatctattttgtacattcccgacatatatccacctactaaaataactcccggtcgggattcacatatagagataaatacatgattctgattaggcgtgtcatgctgataagttgataataaattcgtccattgtttggtagaaggactgtagcaacatacgccattattggttgcataccaaatgtctccttcagaatcttccaatatataattcacttgattatctatcagtgagttagggttgtcataagagtgctgtatccattgatatccgggatatttctcggaatatacagtgatgcctataggatagactgccatccataatttttgatcatcatcaatatagatatcattaatgatattaccgttcattttgttggaatggttgtggtcggcatttagaaaatttgtcaattcgtaagtgcccaagtttaatttatatacgcctgcgccgttagttgctattaacacctcgttttcattttctttacttgctatgatagagttgacattaatgtcttgtagtccgttgtgtacatcaatcagttggcggctatggatattgtatagataaataccatccaataaggtacctattactaacatttgggtttccggatgaaaatagatgtagtttactatatggaaattatccagttccggatgcttgattacttctaatcgcccatgattcagtcttgcacagtaaatcttgtggctggaggctagaaaatattgattgttcgtagatttcgcaatatatgtgatttcttccttgataggactttccagttgaataagttcatgggtatctatgtcgaaaagatattgtttgtttttggtgcaaagcaatatattattgtctttggagtcaagaaatgaagcggtgagtggcagcccgctgttgcttttgtccttactggcaaaatcgcaaactagttcaaatttgtcttgtagagaattgtatttgaatagatgaccggtttttcctatctcccaaaccactcctgccgtatctatctgcaaagtgttcaagttgggaaaaaagttcagtagttttccattggctgttaagctatagtgtgtgtattgttttccgttatacctgtctattccttcgtgagtgagaaaccacatatagccttttttatcttttcgtatagatagaactctacggctgctcaaaccattctgagtatccagatactggtatagttgagcaacggcaggtgttaccaaaataacaaaaaggcatataagtaaaagaattcttctcatattattaggaggcaaaatccttacaaagttcgtaatttcccttaacatatcaaaatctgttatatacaaaaaaagcggtaatcagtccgactcaccgcttttttagtaaatataacaaatcgtttttattttttgttcatttcaacccattttctagcattgacaaatgcttccatccatggagtaatctgatcgttctttattctatcagccggataataagcattttgccatgggaaacaagagcgttccaaatgaggcatcatggccaaatggcggccgtcaggactggccagaccggctacactgtaatccgaaccgtttggattgccaggatactcatcgtatgagtatttcaatacaacattgtattgatcttcatcatatggcaatgagaatttaccttctccatgggctacccagataccaagcttacttccgcttaacgaaccgaacatgacgcttctattcataggaacggtaacacctacaaacttggattcgaatttatgtgaatcattgtgcagcattttcgctttttgggtgaagtcggggttaatcaggtttaattctatcatcagctggcagccgttacatacgcccaatgacaatgtatctttgcgtgcatagaagttatccaatgcagctttggctttgggattgaacaagaaagctccggcccatcctttagcagagcctaaaacgtccgaattagagaacccaccgcaaaatacgatgaaattgatgtcctccaatgtttcacgtccgctaaccaaatcagtcattgttacatctttcacatcaaatcctgccaaatagagcatataggccatttcgcgttcgccattggttcctttttcacggataatagccgctttgatacctgtcggagtacgacggtcggggttaaggccgaattgtgaaagtttgccggtgaatgatttgtcgaatacaaattccaaaggttgtttcttgtagttctcgaaacgttttttggcacagccgttcatgctctgcttgcagtctagcaagtaagaggtagaataccatacatcgcgcagatagtctatgccgaactggtaagttgcatctcccttttctaccaggatatgccgttcttcagtcggtttacctaattttacgtagcctatgcctacgtcttccaagatcttttttacttcttctttgtgcttattttttacctggataacaatacccggattttcggcgaacaatatcttgatgatgtcatcctccttaatcttgttcaggctgatttccataccaccttccatattcgagaagcacatttcaagcagtgtggtaataagaccaccggcagaaatatcgtgaccggccataatcagacctttatttactaattcttgtactgccaggaatgcgtcacgaaaatattcaggattttgtacagtcggtacatcgtcacctattttattcaatgattgtgcaaaagcagaacctcccagacgtaacttgtcaaaactgaaatcaatatggtagatagtgctcttttcatcatttaccaatacaggagaaaccactttcttcacatccgagacttcgccaccggctgaaacgatgacagttcccgggctaatgatcttctcaccgttaggatatttctgggtcatagataaagaatcttttccggtcggtacattgatttgcaatgagcagcagaaatcggaaagggcttttacggcagtgtacagacgggcgtcttcaccttcctgtgcgcgacatggccacatccagttggcagataaggaaacgctgtccaatccttctgccatcggggcccatacgatattagtcagtgcttcggctaccgacaaaacagagcctgcggccggattggctaaggcggcttggggagcatggcctaaagaagttgctatacctttttcgccacgatagtcgagggctactacaccacaatcgctcagaggcagctggatttcaccttgacattgctggcgggcgattttaccggttacggaacggtctactttattggttaaccaatctttgcaagcaacagcttccagctgaagtacgcggcggatatattcatttaatttggaagtttcgtatgaaacattttcataatggcgttctacagtcttgtcaaccatgtaggtcttcggagaagaaccgaacatttgatctactgccagatcgaacggacgtaccccatcggcctgttcgaaagcaaagcgggcgtctccggttgtttcacctacggtatacatcggcgcacgttcgcgatcagcaattttttgtacatgttcaatagctgattcgtcaatcagcaatcccatacgttcctgagattcgttggcgataatttctttggcagacaaagtctggtcaccgataggtaatttgtccatatgaattaatccaccgttttcttctaccaactcggataaacaattcacgtggccggccgaaccgtggtcgtgaatggaaacaatcgggttgttatcttcttcacacaatgcgcggactacattataggcacgtttttgcatttccgcattggcacgctggacagcgtttagttcgattcccgatgagtaccggcctgtttcaacagaagaaactgaacctccacccaagccgatgcgatagttatcaccacccattacaacgactttgtttcctttttcgggatgtcctttcagacagtcgcgctgagtaccgtaacctacccctcctgccagcataatcactttgtcgtatgcatacttctcgccattttcctggtgctcgaatgttagtacagaaccacaaatcagcggttgaccgaatttgttaccgaaatcggaagcaccgttggaagccttgattaagatctgttccggagtctggtataaccattggcggacaggaaggatatcttcccactcgcgtccctcatcagtacgggggtaagaagtcatataaacggcagtaccagcaatgggccatgagcctttaccaccgcccatgcggtcacggatctcaccaccagtaccggtggatgcaccgttgaatggttctacggttgtcgggaagttatgtgtctcagctttcagtgagataacagtcttgatatctttgataatgaaataatcggaagtggaatgatcggccggagagaattgctctactatcggtccttcggcaaatgctacattatctttataagcagaaataatcttgttgggattttcagcagtagttttcttgatcatctggaacaaggaagactccatttcctgaccatcaataatgaatgttccgccgaatatcttatggcggcaatgctcggaattgatttgcgcgaagccgaatacttcggaatcggttaatttacgtcccaaatctttttcaaccttcagcaaatagtccatctcctcacgagaaagtgccagaccttctttttcattgtattcttcgaggttctcgatgtgaacaattggctggggtttgatgttgactgtgaaaatctcctggttcaatcccttatacatacgttgcagcataggatcgtactcggcgttttcgtcttttacagggaaatattcctcaatgcgtaaaacacctgtaagacccatgttctgagtgatttctacagcatttgtactccagggagtgatcatttcccgacgcggtccgatgaagcaacctttcaggttctcttcgttctctacagtggcttcaccataaagccagcttaatttctgaatatcctcagaaggcagttcctggctgacttctgttgctattacacttttagtgggtgttctgaaaaatagaatcatagcacttttatagttgttttgttaattgaaaactagttctaatatcaagggtctattaataaggtgcaaagttatataaaagagacggggtatgaaagaattttgagtgtaaatataggtactttcgtaaaaaagtagcatctttgcagcatgaattggatagaacaagtaaccatactcgatttattggtgaaagggcttatcgtcggcgtagtggtttctgcgccgctaggtcctgttggggtactttgtatacagcgtacactgaacaagggacgatggtatggatttgttactggtctgggagctgcccttagtgatataggctatgccttgattacaggttatggcatgagttttatggatgatttcttggcaaagaaccaagtattgttacaaattattggcagtatcatgctgttctttttcggtatttatacttttcgtagtaatcctgtccagtctatccgtcctgtatcctctaccccgggcagttatcttcataattttgttactgctttttttgtgactctctccaatcccctcattatattcctgtttataggtttgtttgcccgtttttcttttgtgatgccgggcagtcccataggctttcaactggtggggtatttggctattgtattgggggcgcttctctggtggttcggaattacgtattttgtcaataaagtacgcacccgttttaatttacgcggcatttggattttgaaccgtgtgattggtattgtagtgatgctgatttcagtcgcaggtttcatttatactattttaggaaaaacgatgtactgacaaagaaacatatcttgatgtatcatacgttggttttttgatttttaattattaattttaatttaaaaagtatgtttgtttccaagcagttgaaagaaaagaatatagccgagtatcttatatatatgtggcagatagaggatttaatccgtgccaacggctgtgatatagaaaagataaaaagcaccatcatagctccttatccgttaacggaagagcagaaagcggaactcactcaatggtatatggatttgattgagatgatgcgtcatgaagggattatggaaaaaggccatttgcagattaataaaaacattataacttggcttaccgaccttcatttgcagttattgcgttcccctaagtttccttattataattctgcttattataaagtattgccctatattgtggagttacgcgctaaaggtgcggataaagaggagcctgagctggaaacgtgttttgaggcgctttatggtatcttattgttgaaattgcaaaagaaagaaatcagtgaggaaacaagaaaggcacaagaagcaatctcgacattgctggctatgttgtcaaactactatatagaggataaaaaaggagaattggaattctaataaatgaaatagaaatgaagaatatattggtgactggtgccaacggtcaattaggaaatgaaatgcgtgtgctatcggctgaatacaaggaatatacttgtttttttacggatgtagccgaattggacatttgtgatgagcaggcggtgatgactttcgtgaaagagaataatattcatgtcatagtgaactgtgcggcctatacggcagtagataaggcagaggatgatatagagttatgtaccaagctgaacaagaacgctgtgagctatctggcgaaggcggctgaagccaactggggtgagtttattcagatatcaacggattatgtgttcgatggcacgaaatatcttccttataatgagggagatgttccttgtcccaattccgtttacggcaagaccaaactggccggtgaaacgaatgcattggagtattgcaaaaaaacaatgattatccgtaccgcatggctttattctacttttgggaataattttgtaaaaacgatgatccgtctgggaaaggaaaaggaaactttgggtgtagtctttgatcagattggtacaccgacatatgctcgtgatttggcacgtgtcatctttacagccatttataagggagtggttccgggagtttatcatttcagtgatgaaggggtatgctcctggtatgattttgccaaggctatccatcgtattgccggtatcacgacctgtaaggttagtcccttgcatacaaatgaatatccggcaaaggctccccgtccccattattccgtattggacaagaccaaggttaaaactacttataacattgagattcctcattgggaagagagtctggaagcatgtatcaaagaattaaatgcataataaaatatgaatagtgaaatagaaagaagacggacgtttgcgattatagcacatccggatgccggtaagacctctctaactgaaaaattgttactttttggcggacagatacaggtggccggagccgtaaagagcaataagataaagaagaccgccacatccgactggatggacattgaaaagcagcgtggtatttctgtgaccacttctgtgatggagtttgattacaatgattataaaatcaatattttggatactccgggccatcaggactttgccgaggatacttatcgtactttgacagccgtagatagtgtcattattgtggtggatggtgcgaaaggtgtggaaacgcagacacgtaagttgatggaggtatgccgtatgcgtaatactccggtaatcatatttgtcaacaagatggaccgtgaggcgaaagatccgtttgatttgttggacgaactggaggaggaacttattatcaatgtacgtcctctgacgtggcctattgaaagcggtccccgtttcaaaggtgtgtataacctttatgaacataaactgaatcttttccaaccttccaaacaggtggtaacagaaaaagtggaggttgatatcaatacggaagaactagacaaccagatcggtgctcctttggctgaaaaattgcgcggagaactggaactggttgacggtgtttatcctgaattcaatgtggaggagtacctgaaaggcgagatggctcctgtatttttcgggtcggcattgaataacttcggtgtacaggaactgctggatacatttgtggaaattgctccgagcccccgtcctaccaagacagaagaacgtgaggtggaacccgatgaaccgaaatttaccggatttgtctttaagatcacagctaatattgatcctaatcatcgttcatgtattgcattttgtaaaatttgttcgggaaaattttcccgtaatactccctattatcatgtacgtcatgacaagacgatgcgtttctcttctcccactcagtttatggcacagcgtaaaacaacagtagacgaggcttgggcgggagatatcattggtttgccggataacggaacgttcaagatcggtgatacattgactgaaggtgagaaacttcatttccgtggaattcccagtttttcgcccgagatgtttaaatacattgagaatgctgaccctatgaaacagaaacaattggctaaaggtattgaccagttgatggatgagggtgtggcacagttatttatcaatcagtttaatggacgtaagattatcggtacggtagggcagttgcagtttgaagtgatccagtatcgtctggaaaatgaatataatgcaaaatgccgatgggagcctgtcagcctatacaaggcatgttgggtggaaagtgatgatccggaagagctggaagctttcaaaaaacgtaaatatcagtatatggccaaggatcgtgaaggaagggatgtattcttggctgatagcaattatgtacttcaaatggcacaaatggacttcaagcatattaagttccattttaccagtgagttttaattttttgttggaggtgtgtcaaaaatccctaaggggatggacacacctccttcttattttcacgaaatattcttttttactttattcctctggctttataaattcgttctttagcgttattaatttgttgaaacttctcttctgccgcttttttcacatcttcacccaatgtagcaacacggtcagggtgatgttttaatgccaggcggcgataggctgtacgtacttcctcattggtggcagacgggtcaatttcaagtactttgtaagcttcttccaatgagtttccgctaaggtttagcatggattccacttctttgggtgacagttccatgcattgtgccacttcttttaatgctgctatttcctcagagcatacgcttccgtcacttttggctatgtttaccagaaagtccaacaattgcaaccgttgttcgtaaggcaggttcgaggcaatctgtgcaccacattcatggatggtatttttaaatgccatcggattttgacgctccatctgtttgcgctgttcaaaaagattcagcaaaatctgttctccttggatgactgcctcttcgccgaaattcattcttaagaattggcgtacatattccatttcgctgtgcatgatgcgtccgtctgcacggatgatgtaagacgccataaccaacatggagaataaaaaactattccgctggccttcatcatagtttccagcttccacctgtcctttttcgtatgtattgccaaaaagtccgttgtttccatccagcaatgagcctaaggcaaatccggccaaagctcccagtggtcccatagtcatgaatcctagaataccaccaatccattttcctgctcccattattcttttaattttttcgttttggatgcaaaaataaacaatcttggatgaaaaaagtctctttgccgcattttttactatctttaccaatcaaattaaaaatactatgtttcagaaacttgtagcaatagaacctgtcagtttggttctgtcagcagaaaaaacgttatattcttttgcagatgaggttgttatgtactctgatattccagcgggagatagtgagattattgctcggatcggagatgcggatgctgtattgttaagttatacatcacaaataaaccggtatattttagagagatgtccgaatgtccggtatatcggtatgtgttgttcactatattctcccgaaagtgcgaatgtggatatccgttatgctaatgaacgcggtattacggtgacgggtattcgtgactatggtgacgaaggggtaatagaatatgtagtcagcgaactggtgcgttgtcttcatggatttggtcagaagccgtgggaagggagtccccgggagattaccggcttgaaagtgggtattgtaggcttaggaaaatctggtggtatgatagcggatgcaatgaagttttttggtgcggatatagcttattatgcccgtagtgaaaaaaaagaagccggtgcgaaaggttatcgttttatgcctttgaatgaacttttgacatggagtgaagtggtatgctgttgcttgaataagaatacggttttgttgcatgaggaggagttcaaggcacttggaaatagaaagatactatttaacacaggattgtcacctgcgtgggacgaatcttcgtttacccgatggttggaggaagataatctttgtttttgtgatacattaggagcattggggagtacggcattgcttacccatccgcatgtgcgttgtatgcaagtatcaaccggccgtactcgtcaggcgtttgaccgcctgagcgagaaggtgctggccaatttgtcagaatacaatgggtgaagtgatattgagcagggtgtttactacagaccatcctgcaatctctgatgtagcactgtacacttctactactgcgtgtacttgttcatttttgatttccactttttgagtatcacctgtaaatccaggggtggactgtatggatacctgcatattgtccggtcctacggaagccaatgaggctgcgacagatacatttactttggttggaaaaacatttatagcctctgttgcattgccggaaaagacaatgcatctttcctgttgtagctcttccttgtaaaccgatgtgcctttcaaagcatcaggtcctttttcattgaaaaaacgagctgtagcgtttcccatcaaagaggtggttcttaatacatcaaatcctccgatggctccggataccaagtaaacccgtgtatcgtttgccttggctgtttctttgactttctcataaaaagaggtgtctgccaaagctcctatggatagggtgataatggaagttccgttttccaaggtaggtaaggccagttctttcattgcggcaggcgaggctgattccactagataatcaggttttaactccaacagttcttttaaagtgtgacaggctgcacacatttttccgtattgcctcattttattcgcaatgcgttcggcctttgatgctgtacgcgaatatacgcctactaactcatagtcgggcaacattcctttgacaactgcgtttgttataatttcagcaagtcgtccacatcctactataactaatttattcatagaacaaagataggtattttcatcatataaacctattttgtgaaaaatggaatttattgtgatatgtttcttactctataggtatgtctgtccgagctgtttttagtgtgcttcttaatcccctgtctgatacattaaaaaattatacttgtaatttaaaaatagtatgaggaagattcgtcctgatcaagaatattttttaaggaataatatttacgttttatataacagacagcattattacctgacagaataaatgaaaagtgatggttcagagtcgaatggaaaaatttcttgtaaaaccaatatgattgcatacttattccttaatacatgttttttagcatatttttgatgaatattgcccattaaatttgataaatttcgccttatgcgagaatgcggaaaagtttatacttgtattgagaaaaaatgaatgatatactattaataaaatgttgtattgtctatgaggaaattatttattttaattcaatattagtatgaaaaaaacttacttagatgctttaatgagtatttttacacctattcctttgaataatggtttttattttgtggataacaacgggacgattgattggattctgtcgaatatattccttttagggtacgtgctacctgtagagggggtgatgataggtatctttttctatcttttattatctcatgccatagaacataaaactcaactgatgttccgtgaaaagttcaaacttgttattaatttgttccattatacacatacgcctttggtggtgttacggaatcaattggaagaaattgtggttggtaatcttcctgaatctgctgttacaaagttacagcaggctctgaaaaatgccaatcaggttattgattgcagccagagtgctatttcacttggtaaagcggattggaaaacgattcctcgtgcttctgtggtagagtttgagctttatgcctatatcatgtctgttgtcggtctatgccatctttatgccgattcgcgtcatattcagttaaaagttactgcctgttctgattatatcagttgcaggatcaatgaaaccgtgatgacggtagctcttcagcaccttttgaacaaaatgatagataacacacctcctgacggttgtataaatattatcctttcacattcggcaagttcttgggagttgcgtatcagcaattgtgaaaagataagaaatggaattttaaagatgattccggccatgcctgccttctcttccatatataattatggtgacttatggacggtaaagaaaataatccgtttgcatggcggtaaaataatcggttatggatacggaaaagtggttacttaccaggttattatgccgaaatattttcaatcccaatccgaggcagataccggtatggcgctatctgtaaagaagcaaaaggtttacttggaagaaaccgtatctacagcagaaggaaagagccggactgataaaaaagagagtaaatcttgtattttgttggttatggcagacaaaaagtatagtgattatttaaggatgactctttcggagtatttcaggtgtattgttctggacgctcccgatagaataataagtgcctctgttcaaaataaccctgatgtgattgttgttgacgaaactgtgaatggagtctatggagaggaactttgttctaaagttaaagcagacaaggccatagcgaatattccggttattcttttaattaagtcggcagataatgaaagctatttgtcgcatgtggggagtaaagccgaccggctggaattgcggagtgcgaatatttggaaattccggacagacattactatgcttatagataataatttggtcagacaggaacggatgaggcgatttatagccgatacggttgctcctacacttcccgagaagataagaaaggacgatgcttgtctgaagtttataaataaagtccggcagttgttggaacagaatttggcggaagagtcatataccgttgatgcgcttagtgaagatatgggaatgtcccgcactgctttctataataagatgaagaaaatgacaggacagtcaccggccgattatatgttgacattcaaaatggaaagagcaaagagattattggcctctcaggattactctatcggagaaattgcaacgatgttgggcttttgtgacagtcggtattttgcaaaaaggtttaaggaagcgtgtggtatatgtccgtcaaagtatatcgaaaccataataggctgatgtgatatgatgcggattctccataccttattttatgataggctgttttgacatgttttcattgtagaggtggcaaagtccctgaatttcgatgaaatgggaagaaatgaaaatctactcgtgaaaaagagatgtctatgacgaatctaaaatgaagatttaaggtaaatctaaggttgtttcttcttgtttttatgaatagtttgtttactttgtgccagataagtaaatatagaaatcaaatgaaaaacaaacaactattatgcgttttattccctttgttggtggcgtgtaccgggcaacgccaccaacagcaggtatccagtgagtcaatcatagaagaagcggtgcggaagggagaagttctgaaaggggagattgttcccattgatacggctctgttccggtatgcctatcgtatgcgtgtacagggtgacaaggcggtgatattggatttgcacaatgccgattactattatcatgtatttacttatcccgattttcagtatcagtcttcttttggaaagcgtggggaaggtccgggtgagtccatttatgcggcgaatatccgttttgcagggcaggacacggtgtgggtgcttgatgacggcaagggtaggatgtatcaatatagcggtatagccggggggaaaactcccaaacaggaaaaggatattttgttggataagcgcttgttccgttcccttgattttgatttgaaggatgcctctactgttgttatccccgattattccggtgagaaccgtttcagttgggcttcactctcttccggcgaattgcttcgtaaatccgagcagatacctgtgtccgatccggaactgttgagagaaagtgcgcctgctgtggctcaaggctggaacagttttgtatcattcagtcctgataagaagatattggtttctgtcactcagtttggagataggctcgatatttatagcatggcttcacaaaagcatataggagaattgggtggggatggtgaaccccaatttaaagtgagtcctgaagggtatggccttccggcaggcagaatctgctattatgatgtgcaggtgactgataactatatttatgccatttatgacgggcgcaaatttaaagatattatgaagttggccgatgcctataagcaggggggcaggatattgcgtatatttacccatgaaggcaatgtggtgaaaacccttgtacttgatcgtcctatagccggtatttatgtggatgaggctgccggtctgctattcggtatggatgtcaatgctgacgagcagatagtaaaatactccacatgcaaccggcagtatactcccagcaaacgaagaatcagatagaaagtatattgaaaatgcttttctgtcgcctcaaccgtctttatcgagccatgagaattatacggtatatcggcaaggaaagaagttaatacagtgcagaaagctgtagtctccccttcttcaagcaaaatgacggcatctacaatccaattggaaatctcggtatctttgggctttaaataattggcagccaccatggtcaggaaccctttcgtttcctctattgtatagttaaacttatttgccagatctgcaaatagccaatccttcaaaaaattctttccttcccttgaaataagtatccagggtactcaccagcagattctttccaaaacgtcggggacggctcagaaaatatgtcgtactcacagataccaacttataaatcaaagctgtcctgtccacatagacaaaaccatcttcacgcatcttgtcaaagatctgtataccaatgggatatttcattattccctttttcttaaacggattgttaatgcgaagataaatcgttatctttgcattaacaataaaagttggaaaaaagctcattcatccatttgaagaaataaccagacggtatccttttttaggttctgttataatctgatattctggaaagttctttattgaggatttaagggtggaaatatgattatgtattttattgtcgggcttgtcctcttgcggccaaaatacattctttatgtcttctttggttagaaaatgttccggtgcattgatgaatagtaacagcagattgaaatccgcaggtgctatgggacacggctggtcgttgatatacaatttctgactttccagctttaaaaccatcttttcaaatcgtgtgcagttctgactggccgggatatctttttccagcggctttttcaaaaatgacaaagacacccataccaagacgatgaaataggcgatgatgctccataacacttttggagtagtatgttttactatttctgtccaatgaatcatagcccatgcctgtacgccggcacttctttttgcatctattgtttgtacaggggtgacaagggccgactgaaaggagattgaatcattgtcactaaatgccttttccttgttgtggcggtaaatgattcccgtctttatagcagaaatcccattcttttcccatccttcttggaagatcttattgaatttgtcaggattgacagggataatctttgtcatcacatactggttgaccgattgggtagccagtgactcatggatgctgtcttcaaaataaatggtttccatgctatcaccgcattctatttgaacaccttttaactttctgcctaaaggacgatagctaacaagtattttgtttaatcgttcctgataatcaatgttgatcgtttcacgtaggctgtccttcattgttatcagaacatttgttttttcatctttaaaagcaacataagatagtaggatgaatacaatccatcccaatacaataaaacttaacttgagtaaagttgctaactttttcatgtctcctgtttgtgatacattgcaaaggtacatttttttgtgagaattagattcataatccggagagaatatgtgacttaatagcatgattcacataattggagctaaattgtaccttgatgattttttcgatgaaatgggtgtttttagaaccttaagaaaactttaagatcaccttaagctgaatttaaggggaaaagtttgtacggttgataaatgttctctactttcacataaaaatgataaacaaatgaaaaaagcaattatgttgtttaccactgttatagtaatggtggtagtggtttgggaaaagacctctggaaaggcggtagagagtaaactccttttagataatgtggaggccttggcggctggagagtttggacgtgatacatgtctaggtagtggaaatgttacttgcagtaccggagaaaaagtggaatatgttcttagaccttttagcttggattagtcaatgagatgcctttgtctattactatgcgtacttgctctgttttcctcctgcaaagaatctgaaaaagataaaatcgctcgtttggttgaggaatgggaggggaaagaaattctctttcctgcccgttccgtctttactattcaagggaaggatacggtgaatttttcttttgtcgatgcagactataaggtagtgacatatatcgattcagtaggatgtaccagttgcaagttacaattgcctcgctggaagcagtttatgcaggaagtggattcaactctgaaccgtcctgttccctttgcgttctattttcatccgaaagatatgaaagaactgcgttatattacctgtcgtgatgtattcacctatcctgtttgtttcgatgaaatggatgattttaatcaattgaaccattttccgggtgaaatgactttccaaacatttctattggataaagataataaggtggtggctataggcaatccagttcataatccgaaggtgaaggaactttatctgaaggtattgacaggtggtgaagttgtaaaagcggaaacgccgatcacgaaagtcattcaggatgtggaaagtatagacttcggttcatttcctcagttggagaagcaggaacgcaagttcacgttgaccaatacggggcagtatgtgctggtgatatacgatgttatcacttcttgtggctgtactagggtaaactatagtaaggaaggtatccgtccgggagaaaaagcggtgctgacagtgatttatgaagccgaaaaggctgaacatttcagcaagacggttaccatttattgcaatgcagacaattccccacttcgtttgaagataacgggaaatgctgaataaagatgaagtataagctaatgagagtaaaaagcggatggaaagaaatcctttttctttgccggaatcagattctttccaccctgcggctctctcctaaaagaaaggaggttaagtccaatgcaaaagtaatgtaaaagattggaatgggcaagcggtaggtttgcttttcctgaggtggaacttgtttccataaagagattacaatgaaagtaacaattcatcaaaaaaataaaagacgatgaaaggaaaaattttgaaagtaactatagttgctgcatttgctttgatagcaggatttaatgtgtataacgctcagaaatcggatgttatgtctgatttggctttggctaatgtggaagcattagcccagtctgaaggttctggtagcagtggttgtcgatatcggatggcttcacgttgtggagtggtcgattcttcaatgccttggagaccggtaatgactatttatgaagatcattatttttagaaaacataacgtttatcggttacgagttatttttgtaaccgataaatcgaaaaatacggaaaagtatgaagaactatatatattatttattattactcgcattgagcatatcttgcacagctaataaaaaaggaatagacaaaacagaaaaacagacagatcaactggtatatactcatgttagtggagaaaacctgaaaagtgattctacgttatggggtatgaaaattgattttgtaaaagatggccatttatttattcaggaactatctaatgacttattgtatggggtttatcgtatagaagacgacagcctaataaaagaaggcgggttcttaaccaaaggggaaggaccttttgaggttgttcatcctgacttgtggggaaatgaagatgactcggttttctatgtttcaaactatgccgggataataaaagaaatatatagcataaagatggctgacatctatcataaagagaaatggaatattattccatttccggattctcaaggatgtctgttttatccttctattgctataatgaatgatagtatttgtgtcgtttcaggctcaaagttaagcagtgtcaatatattatcttatgtcaatttgcaaactggggaaatatcggatttagatttcccttttcccggatttgtcctcccctcagattttaagactgcggagcacatgatttattgtgatgcacaacttttaaaacatcccagtcaaaataagctgttatatgtttgtcgtttaggacgatatgtgaaaattgtggaaatagagaacagacaaattagcagacaaatctctttatactccattcttccccaatatgaagtagtaaatggtgaccgaaaaataaaagatgattgtttgggtggaattgttgcaaaagtgacaaatgatcggatctattgccttgttttaccttatacaagaaaagaagaaaatgagcagcctttctataaaggtatgccgaattattttgctgatgaactggtggtttttgattggaatggaaacattatcgaggcctatagattggatcagcctatttgtaattttggagtagatgggacaaaaaatatcctatatggaacgacattggatggagaagacttcgtagtgagaaaatataatttgacgaatgctggataaataatatgtcatttatgactgtatcatctaaatgacatatttttaaaattaatggctatatgtgcatattgaagtatttgctttttggttgtgttatatgcatcttttgttctcatgtatttttgcatcagaaacagtgggatgtatgcttgggatttttcagcagcaaacagaaaggaacttgaagcattatgaacacgactctttaaaattggaggcagctaaatttctgatacggaatatgcctattgtgttgtaatgcaacttcatttgaaggtgacggggaaaactgaataaggataaagtataaaccaatgagagtaaagacggatgaaaagaaaggaggttaagtctgatgcaaaagtaatgtaaaaatcagaataagcaagcaggagtttggctttttctgcggtggagttctttccgataaaagatgaaaacataagtggttaatcatctttaaaaccagaaacgagatgaagaagaatattttgaaagcaactttggttgctgcgtttgctttgatagcaggaatgaatgtgtataacgctcagaagtcggatgtactgtctgatttggctttggctaatgtggaagcgttggctagtggtagcgaagggggaggacttccttggaaaggttattattctaattgggataagggttgttgttcgccaggaaaatggaatgatgaatgttctggttctttttctccttgctgatacgaaaaatgatatgaagatacaataccttggactttgtagtaaaaagatgaaaaagtatagttatatattctattactttttgttgttggtgtcatgcgaaaatactgataaacagaatacgatagatattgatttaagtaaaacggattcatgtatcgcatattccatgtttgtaaaatcggtagagaatctggacttgcacataacagacggtctaccgataactggtgtcgaacgtttgtattttgatgaaagtaaaatctttgtgaaagatagcggtcgtgagggtattcttgtatttgacaaaggaagcggcaatttattaaaaagggtaaatccctttggcgaaggaccagaagaaataaaacgtattagttcattctgcttggacacttatcataaaaagatatgtatttttgatcagagtgatatgaaagtcaaaatgtatgatttttcaggaaagtatgcctcttcttatcctactgatatgtttttcattgacatggcaaagctggataaaaatagtatgacttacttttatcccatttacgcagaagaacaattttatggcatttggtcttccgattctttaaatcaattgaagaagcaggtaagttctcatgtaacgaaggaatgtatgttccattattttcctatgctttataatatgaatgacacctgtgtttattattacgacaggaattgggatgaaatatctgttgtcacttcagacagtattcaaacactatatagcttgggtgtgaaacaacgtattccgttgtttaaaaaagggataagggacattactcctcaggagttggatgggtatgccattcttcataattttgcttgttctaataattttatcttatgttctttccatacatttgacaagaatgatataaggaagaaaaatataacatgggtgttgcttgatacaagaacaggaaaggtaacgatatcgaaaaaattgaaaaacgatttgatggctgaagatgaaattgagaataattcattattttatatgaataattatacttggttgcgagtagacgattcattcgaagatttaattcgtttgaaaatattacatctgcaataagtatcttgctttaaaaactatttaggagagaactgtagtagttttcgctttttctgcggtggagttctttccgataaaaaatgaaaatacgaataataatcatctttaaaactaaaaataagatgaagaagaatattttgaaagcaactttggttgctgcatttgttctgatagcaggatttaatgtgtataacgctcagaagtcggatgtcatgtctgatttagcattggctaatgtcaaagcattggctggcggtgaaggttctggaggtggatgccattatcgaataacatatcaatgtggaattgttgattcgacagttccatggcatccgactcttaatacacaaaaagatgcgactatatataattaaatcaatgtttaaaatttgaaaaaatgagaacctttctttatatatttattataattagctttatggcttcttgttcattaaaaaaaacgggtcaagtatctaataagttagatgaaaattctattgaatttgtttttttattgggcaagaatttgccatgtgattccatattgtggggagctagtattgattttgttaacgatagtctgctgattatcgaggaattatctggaacttcaacttatggtgtatacagagtgtattctgataaattagtaaaggaaggttctttcttaactattgggaatggtccttttgaggctgtccaaccttatctttggggaaatggagataaaaatattttgtatgtaacagatttttctggaaggctaagatgcatctataaaatgaatgtcgagaagatttatcacaaagacttgtgggaaactatacatgctccggatgcaggtgaacatttgctgtttccttcagtagcaatgatgaatgatactctttgctttattgtagggtcaggtctatatagtgataatatattatcggttatagatttcaagttaggtacaacggaggaagtagatgagtttaaatttcctggattcaattctccctctgaattaaaagttgctaaacacatggtatattgtgatgccgagttgctgaagcatcctacagaaaataaaattgtatatgccggcagactaggcagatatatagagatatttgaaatagaaggtaaagagattagaaaaaggacacctgtctgctccacttatccttcattccgtatcacctctgatcagcagcaaattttgaatgatgactgtttacggggagtacttgttcgagttactaaaaaccgaatttacagtttgatgagaccctatactgaaaaagaggctggagaacatgactcatataaagaacgtcccaattattatggtgacgaactgatagtgtatgattgggatggtaatctcataaatgcttatagattagatgttcctatagtttctttcggagtgactaatgacgacagtgtactttatggaacgacattggatgaagaagacttcgtggtgagaaaatataatttgaagaatgctgaatagataataattatttgtgactgtataatcataaataatatattcttaaaatctatagctatatgtgcatactgaaatatttgcttttttgttgtgttatatgcatttcttgttcccacgcatctttgcatcagaaacagttgatgcatgctttggatttttcagcggcaaacagcaaggaactggaaaaagtactgaagcattatgaacacgattctttaaaattggaagcggctaaatttctgatacggaatatgcctcattgctattcctaccaacagggaggtgaaatggatagtgtgaagcgtgtacgtacttattatagtcctttcggacaaatagaccagacttatgccagacgttgggggcattatacctatcgtaatcttcttaaaatatatgatgcccatattatcacagccgaatacttgatagacaatatagaccgtgcttttgataattggcagaaacgtccatggaaccgttctctttcatttgaagatttttgtgaatacttgttgccttatcgtataggggatgaaccgctggaagaatggcgtgaactttatgaaaagaaatatggatatttattagattccatatataaaggcagcgatgtggtggaggccgcgaatttggtaagcaagcatctacaagaacctgtctttatttattgtgaagactttgagctgcctcatatcggtcccaggtatttattcagccatcgatatggtagttgcgtggatgcggcggatatagtgacttatgcatttcgggctgtcggcattccttgtatggaagatacggatgccagagggggacatgtatggaatgttgttcgtgacacgacagggcgcgatgtacctatttggtatatagcttcagaggctgtgagggggagtagggatacgggagggtataaacgtggcaaggtttacaggcccatgtatggttttcaagaagaaaaggcggcacatctgggagatgattggaaatcagtgccgcttttattctatcacccttatatgaaagatgtcagttatgcatattatccggatacgttacgcatacttaccggtattcctgatggtgaggtttgttatctggcccatttccacgaagcgcattggtggagttgtgcctgtgcacgctcggcaagcggcaagatggaaatacctaatctagaatcggaactggtatatcttcccatgaaatataccaaaggcaattattatccttccggcttccccttttggtttgcaggtggagaaataaatacgtttcttccggattgggagaaaacagtaaaggttcgtttgtatagaaaatatccggtatatggttggttgcgcagctttatgggccatgtggtgggaggtacttttgagggaagtatgacgaaagactttgaagatggaaagacattatatgagatagcggatactcccgtgatagcaaggaatagaatctttctgaataagccggttaagtgccgttacataagatataaggctgacaatgataaatgcgcggaactggcggaaatgacattttatgccaatggcaaggctgtttctccgatagcggtttgggggagtcctacggaaaaaggaaatatgcatgtgctggcaaagcacgtggcggatggtgatcctctttcttattatctgtctttagacaaaggaggggaggttgttgttgatttgggttgtgccgcagttatagattgcctggagtatatgccccggaatgacgacaattttatttctccgggtgatacttatgagttgttctgtcatgccggtactgaaggatggaagagtttgggaaaacagcgggctgatactacctgtttggactggattgtgcctgacaatgcattgttctggttacgcgatctgacccgtgggcgtgaagaacatattttctttatgcagaacgggcggcagaaatttccaaccttttaagatttaaaatgaggtatataaagaaatacataggcattttatataacttgctggtttgtgtggccggagggggtttgttaatgatgattatttggttgttattacagatatttgtttttgcctcatttgccataccttctgactccatggagccggttttgataccgggtgactatgtgcttgtcaataaaatgttgaaaggaccacgtatattcagccttggtgatgcccggcaacataagccgctacacatagatcgtttgaagggattcagtgaatttcggcgcaatgaggtattggtctttaatttcccttatccggaacgatgggacagtgtaggctttaacctgatgctttattatgtaaagaggtgtatcgcattgccgggtgatactgttgaaataagggacgcccgatatagggtcagaggttatgataaggaattaggaaatatagtttcacaaaacagtttggcgcattttttggagaaaccgaggaatgtggagaaaatgatacaggaaaattgtttttttgcttatcccggtgataccatcttaaaatggagtattaaagattttggtcctttttatcttccttcccgtggggatactattgtgatggatgataaacattatttgctttatcgcaaccttatagaatgggagcaacaagataaattaatagcgagtaacgggcatttttatttaaatgggcgggaagtggagcattatgtttttatgcacaattattatttcatgggtggtgataattgttataattctcaggactcgcgctattgggggcctttgccggaggaatatattgtaggaaaggcgacattgatatggaagtctaagaatagagtgacggatgaaatacgtatggacaggatatttaaaaagataaagtagtatgagagtttgtggtgtatattttgtttttgtaattcttctttctgcttgtacgaatggagtaagtcatttggatattgctttgcagcaggctaaacataataaagcggagttggaaaaagtgttgaagcattttaaacatgatagcttgaaataccgtgctgcctgttttttgattgaaaatatgcctggtaaatattcaatactcccttatgattcgttggatagatataagaactttttgaagattatcccacaaaatgatcctataagttgggatgtacgatattctaagatttggcatggatttgattctatttctaaacgacagttggcaggctttagtaagattgaagatataaaagttataacgggagattatttaataaaaaatattgaatattcctttaagatatgggagaatggaaaaataaaagattactgttcatttgatgaattctgtcattatattttgccttatcgtatagaccatgagccattatcggattggcgtgaggaaggttttcaaaagtttggtcatttattggattctttaatgtctccacgagaattggcccttcgtatcataaaattaggtggaatgcgttataatataggaatgactaaatatccttataaacagtcttatgctgaaatgctacagacccgttggggtacttgtgatgatatggcggcatttttagctttgtctttacgtgccattggaatccctgcttctattgattatgttccggcatgggctaataggagttcttcgcattgttggaatgtggtgaaagatgctactggtgattttatagaagtgggatatggtcctgaaggaaaaaatgaagttgtatacaagatttctaagatttataggaaaaaatatgatattccactatgtgacgttacatccgaatatgctatgcctctttctgatttaacctttagagtgccttcacagaaagataaacaattaatcagtctttgtacttttaataattatgactgggttcctgttgctttatcaaaggtgatgaatggaagtgttttgtttgaatcagtcgggagaggaattttatggggagataatcaaataagaacttatttaaacgaaggaaaggggatcgttttcttagcatttatcagccaaaaagggcgattgaataataaacctatagggtttcctgtaattcttttagaagatggaaccataaaagagctgtgtgctagtacagaaaaagaaagtattatactttaccgtaaatacccatattatggaagtaataatgcaataatatatgatagtaatgaaatatgtgtcgataatgaatatgaattgttctattggaatatgaaatggattagtttagggcgaaaatttgcagtcgacaataaacttcattatgatgatgtacctaaaggcgctttattgtggttaaaaaatcatactcaaggaaaagaagagcggatttttacatacgaagatgggaaacaagtttggtggtagaaatgggaaataaatggctgaaatatggaatagcattggtggcaggcataccggttgcgttgtgtctcagcatggtgtgttgtggcacgtcttcactgcctgccgatatactggaagatgactggcggtggatgtatgcttgtggtattttttcattggcagcttttaccctgttgatatttctttttccggcacggattaaggaatgtctgccggctgtcgtatcatgggtatttattctatacggagtcgttgaagccgtgtggggcatccgtcaggtgtatggatttacctattccaaccattccctctatgccttgaccggttcattctataatcccggtccttattcaggctaccttgccatgatattccctatctgtctgtatgaatggttaaagcggaaggaggataagaaaaccatatcttattatattgttttattcggaatgctattgattctttgtgtgttgcctgccggtatgagccgctcggcatggatagccgcatcggtctcttccgtttatatttgtagtatgcactataggatggaaattcagcattatatcaggcatcatcgtaagcaggcagtgtcttttgccatagtaacctttattttgggcggtatagcattgggtggcatttatcaaatgaagaaggattccgcagacggacgtctgttcttatggaaaattgctgtccgggctgtcaatgaacatccatggacaggatgcggctggaacagtgttccggctgcttacggacaggcgcaggagaattattttgcagccggaaattatacggcaacggaggaacttgtggcaggtgctcccgaatatgtttttaatgaatatctgcaagtagccattgcctggggaatacctgtgctttgcatcgggttgttgatactaagtgggagcatgtacataggtcataaacaaggcatctatggactatgcggcgcattgctatctttagcggtatttgcgttttcttcttatccactacaatttccagcgtttgtttcggctttgattatattagtattagcttgcggtatccgtgttcttcctttagagaaagtttggccgcgcattttgtttactgttttattgttaatcggaagctatggctgtttctgtaaatatcagcagaaatccaagactgtagaagcttgtaagcaatggaccaaaagccgtatgttttaccactcgggagcttaccggcaagcagtagaaagttatgctgaaattcagaaagaaatgagagagaatgctcgctttatgtttgagtatggccatgccttgcataaactgcatgaacccgaactgtctaacaaggtactgaaagaggccttgaaagtgagtggcgatcccatgatactaaatattatcgggaaaaacgaacaggaaatgaagcattatgaaagtgcggaatattggtttatgcgtgccgttcatcggctacccgggaggatttatccttattatcttttggccaatctatatgcggatccgtctttttatcggcgtgacaaattggagcggatggtacagacggtattggagaaagaaccgaaaattcaatctaccgctatcaagcagatgagacggaaagcacgggaattattaaaaaaagtacctgaaaattagttttttcaaaataaaaagtttttatttgttatagatatcacaaaatatgaccatgaaattacacatctttgcatcgggcttattgttagctatttctttcactgcctgctcgggagaaaaaaaggaaacaacggaaaaagaaggggtggaaacagttcttccttctttacccaatgaggtgacggtgatgccgctcaaaaagcaggttttcaatcatgagttgatcagtaacgggaaagtgacggcgcaggattatgccgacctgtattttcgtacctcggaagtggtggcaaacgtatgggtaaagaatggagatatagtgcgaaaaggtcaaaagattgcccaattggatttgtttaagctgaacaatacgctggtacagaataaaaatagtctggcgcaggctaccttggagatgcaggatgtgttgataggacaaggatatgctcccgataatctgaaggtgatacctgctgatgtgctggaactggccaaagtaaaaagcgggtatgagcagagtaaagcccaatatgaatctgctcaatatgatatggaacaagctacgttgactgctcctttcgatggagtaattgccaacctctttgaaaagaggtataatatgcccaaaacttccgagcctttctgtcgggtaatccatacaggtaatatggaggtggatttcaccgtacttgaaaatgagctgccattactgaaagtgggggataaggtggagattactccttatgcatcggcagcaggggtgcgccagggaagtatcagtgagattaatccgctggtggacgagaatggaatggtacggataaaggcacgagtgaacgggagtaataaattgttcgacggcatgaatgtaagggtaggcgtgaagcgttctgtgggtgaacaactggttatccccaaaacggcagttgtactacgttccggcaaacaggtggtatttacactgaaagagggtaaagctatgtggaactatgtgcatacgggattggagaatatggaggaatataccataacagatggactggaagagggcatggaggtaataactaccggaaatgtgaatctggctcatgaagcaccggtgagggtgattaaaaattgaaagtatggttaagttcttattgcaacggcccattgcggtgctgatggcttttaccgcctgttttattgtagggttggtaacctacttttcgttgcctgtatctttgctgcccgatattgccataccgcagattaccatacagatgacgggcgagaattcatcggcacgcgagttggagaatacggtggtcacccctgtgcgcaggcagttgttgcaagtagccggactgagggagataaaaagtgaaacccgtgacggggcgggtgtgatccgtctggagtttgattttggcgtgaataccgatctggcatttatagaggtgaatgagaagatagatgccgctatgaacagtcttcccaaggaagtgacacgtcccaaagccatcaaggcaagtgcgacggatattcctgtactttacgtcaatatgaccttgaaaaacgacggtgcttatcgggaaaccgacgagcaacaatttctggagttgtgcgaattggcggagaatgtggtgaaacgccgcatcgaacagttacccgaagtggctatggcggatataaccggagtgcccggaaggcttttgcaaattgttcctgataaagataaactggccatgacggggatcagtgtggaggatatagagaatacactttccgccaataatgtagagccgggaagcatgttggtgagggatggctattatgaatataatatccgtatagctaccttactccgtacgccggaggatgtgagaaatatttatatccgtaaaggggaacgcattatgcaattgaaagaattttgcaaagtggatgttgtttcgcaaaaagagatgggacgctccgttgccggaggaaaaagagcggtgacgctggccattatcaagcagagtgatgaaaatatggatgccatgaaggcgaagctgaaggaaacgaccgattattttgcatccctgtatccggatatcgagttcagtgtgagccgtaaccaaacagaattgttggactatactatttcgaatttgcagcagaatctttctttggggttcttgtttatctttattgtagctgtgctgtttctgggggatgtacgttcaccgctgattattggtatcagcatggtcacttctattgttattacgttctttttcttttatttctgtcatgtgtcgctgaatgtgatatcactttcgggcttgattctggcagtgggtatgatgatagacagcgccattattgtaacggagaatatttcgcagtatcgtgaacggggatattctctgaaacgttcttgtgccgtgggcacgacggaaatgattacaccgatgctcagttcgtcccttacaaccattgcggtatttgtgcctctgatatttatgagcggcatagctggagctatttttatggatcaggctttttctattacggtgggattgatgatatcttatattacgggtattatgttgctgcccgtattgtatctgttgttttataaggctggtatccgtagtaagggatttctttccagacgttttgacaatctgctgaaaaatgagtggctggaaagcttttatgataaagggattgactgggtgttctcacataaaaagctttgtgtggtcggcacgctggcaacccttccactgtgtgtgtttcttttttatgtcatggagaaggaacgtatgccgcagattgaccagaatgaactggtggcacggatagaatggaatgagaatatccatgtggacgagaacaaccgccgggtggatgatttaatgaaacaggtggacgaccgggtgacagagcatacggcatacgtgggtatgcaggattatatattgaacgggggcagcgaactttcatctaccgaagcggaactttattttaagacagaaagtccatccggaatcttttcattgcaggaattattggggaaggagataagggagaagtatccgttggcagtggttactttctcaccccccgaaactatctttgaaaagttgtttgtgacaggagaggcggatgtggtagcggaactccatacggcgaataaatcgcaggcaccggaggcggagcgtttgcagcggttagaaaaggaaatcacgcaggtgacgggcaatgttccgacgggcatcgctttccggaaccagatgaatctgataatcaataaagaaaaactgttgttgtataacgtatcatacgatgaattgacgcgggtactccgcacagctttcaaagagaacaaggtttctactttacgctcctaccagcaatatctgcctatcagtattgccggggaggaaaagagtgtaaatagtgtattaagtgaaactttggtgcggacgatggcagatggtaacggagaggtgaattatattcctttgaataacctggtgacggtagtgcccgccgaagatttgaagagtattacggcgggaaagaacggagaatatattcctttaagcttttatgatgtgaaggatgcaccgggactgatgcggaaggtgaaagaggtggttaatgaggaaaaggaatgggaggtggatttttcgggtagtttcttttcgaatgaaaaaatgatgggggaattgactgtgattctttttgtttctttgttgctgatgtattttatcctttgcgcgcagtttgagagtttcttgcaaccgctgattgtcttgatggaaattcctattgatacggcttttgctttgctggcattatgggttttcggtcacacgctgaatttgatgtccgccataggcattatcgtgacttgtggtattgtggtgaatgactctattttaaaaatggatgccatcaatgaattacggaaagcggggatgcctttggtggaagccattcatacagcaggcaggcgcaggttgagggcaattatcatgacttcgctgacaactatttttgcaatggttccgttgctgtttacctcggatatggggtcggagatgcagaagcctttgtctattgccatgattggctctatggtggtgggaactttggtcagcttgtttatcattcctttgatatattggtttatttatagaaaacatgacaagaatgaagtacattagtatatggatagtgggatgtatgctgtctttcggggtaaaggcgcagcaggtggtgaagctggatttgcaacgtacgatagagattgcgaatgatagttccttgtccgctttcagatatcagaatctttatttgtcgggatattgggaatatcgtacttacaaggcgaaccgtttgccgagtcttacgctggatctgactccggctaaatattatcgctatatcacccagcgttatgattcgaatgaggatatggatgtgtatcgtgaacaacagatgttcagtgcatcaggcggattgagtatcaaacagaatctggactggacgggcggtactttctatattgattcggaactggactttatgcgtaatttcggtgactcaaagtctacacaatattccagtatccctgtgcgtgtgggatatcaacagagcctgttgggatataatgcttttcgttgggaccggaaaatagagccgttgaagtatgaaaaggtgaagaagcaattcatttataacacggaaatggtttcagaagaagcggtgacttatttctttgcgttggctatggcacaggcggattaccgcttggcggaggagaatgtggcgtccagtgataccctttatagcatcgggctccagcgtcataagatagcagcgatatcacgtgccgatttgctgacattgcaactggacaaagtgaatgcgcataatacgttgcagaatgcgcagattgctttgaaacgcgctatgttttcattggcttcctttctgaatctggataagaataccgtgattgaattggatataccgggacgtcccacaggaaagatgattccggtagatgatgcgttgatgcgggccaaagagaataatcctactttcctggaacaacggcagaatgtgctggaagcggaacagaatgtggacaagacaaagaaagaatcccgtttcaatgctagttttaatgccagtgtgggttttaaccaggtggcggataaactgggagatgcctacagacatcctttgcaacaggatttggtttctgtcagtgtttctattcctttgattgactggggagtgagaaagggtaaatataatatggcgagaaataatctgaatgtggtgaggattgccgctcgtcaggaagaactgagtgtggaggaagaggtgattatgacggtgaatgattttaacattcagcagagtttgattgcgagtgcggaggaggctttggaccttgccgtaatggcatacgagcagacacgccaacgttttatcatcggaaaggcggatgtgaatagtcttactctttcgttgaaccgccagcaggaagcgcagaaaaattatatttcggctttgcagaattattggttgaattattataagatacgtaaactgacgctgcacgattttgagtccggtttttctctggcggacaagtttgattttaatactggaatttatcgatgagtaatccgcgtaacctctcctcgtttactctgatagtgacatttgtctgtctgtcactgataggggtggtattagtaccgttgttgccggttaagctggcgccgtcgcgtaccttgcccggtctgactgtttctttcagtatgcccggcaattcgtcacgggttattgaggcggaggttaccagtaaactggaggcgatgatggccagagtaaagggaatcaggaaggtgaactctacttcggataacggcagcggctcaatttctttggaattggataagcatgcggatattgacgttacccgctttgaagtgtctaccatcatcagacagacctggcctcaactgcccgagggggtgagttaccctcaaatcagtacgcgacgttcggatgataaggcgtccagaccttttattacttatacactgaatgcgcctgccaatcctattttgattcagcagtatgcggaagagaatatcaagccggtattgggacagttgaaggggatttataaagtggaactgaatggagctacacctatggagtggcagttggagtatgacagtgaccagctttcacatttgggaatcacactgcaggctgtacaacgggccattaaccgccattatgaaaaagagtttctagggatctgttctattgagaaaggtgcggagggcagagagtggatcagactggtacgtacatctactgaaaaagaaatggaatttgaaccgggagtcattcaactgcaagccgaagatggaacgatggttacgctggataaactgataaaggtaaggcatgtggaagaacgaccgcaaagttattaccggataaacgggctgaattctgtctacctgtatattacggccgaggaaacagccaatcaattaaaattaagtggggaagtgaagcaccttatgggtgagctgcaacagaagatgcctccggggtatgaggtacatatcagttatgatgctacggaatatattcagaaagagttggataagatttatttccgtaccgggctgactgtattgattctattgctgtttgtagcgttgataacatggaatctgcgttatctgtttctgattgtgaccagtctggcggttaatatatctgttgccgtcattctttattatgcatttggtttggaaatgcagctttattcattggcgggcattaccatctcattgaatttggtgatcgataatacgatagtgatgacagaccatattctgcatcgacgtaatctgaaggcgtttgtttctgtactggcggccacgctgactactatcggggcattggttattatcttctttctggatgagaagatacgtctgaacttgcaggattttgcagcggtggtcattatcaatctggctgtatctttgtttgttgccttattctttgttccgtccatgattgataaaataggtttggagaagaaaaagagaagaaaaagaagacgttttctgctcagacctacttttatgaaacggttgactgtctattttacccgtttctatcaagggttgatttattatttatgccgtttcagggtgatagcttgcctgctgttgctgctagggttcggtctgcctgtatttatgctgcccgagaagatggaaggagaaggtaaatgggtggaatattataataaggtatttgataattccactttcaaggataaggtaaagccggtaatcaacaaggctttaggtggtagtctccgtctttttgcagagaaagtatacgagggaagttatttcaatcgagatgaaggtgaagtggtgctttccgtttatgctactttgcctaatggcagtacattagagcagatgaatgtgctgataaagaggatggaaacttatctgagcgattttaaggaaattaggcagtttcagacgtatatctataatgcgcgtcaggctaatattcagatttattttacaaaagaaaatcagcggagcggattcccgtatactttgaaagctaatataatcagtaaggcactgactttgggaggtggtagctggagcgtatatggtttgcaagatcagggattcagtaacgatgtgcgtgagagtgccggcagtttccgtgtgaaactgtatgggtataattacgacgaactttcttattggacggaacggctgaaggagaagttgttattacaccgccgtatcaaggaagtgacggtaaattcggagttttcttggtggaaagatgattatagtgagttttatctggatttggacaagctgaggatggcgaaagagaatgttacagccacgcagctgtttaccgctttgcgccctgtattcggacgggatatttattgtggtaacgtgttgtttgataatcagacggaacaactgaagctttcatcgctccaagggcagcaatatgatgtatggggcttggttaatataccgtttttcatcaatggccgttcttataaactggccgatttcgctactgttcagaaaggacagtcaccccagaaagttgcaaaagaaaaccaacaatatcgtctttgcctgcaatatgaatatatcggttcatccgaacaaggaaaaaaactgttgaagaaggacttggaggaatttaataaggtattacctatgggatatacagccgaaaatgatcaggattattggtcatggaataaaaaagataacaagcaatatgcattgttgttgattgtaatcgccattattttctttacgacggctattttgtttaattctttgaaacagcctttggctatcatttttgtcattccgatatcctacattggcgtattccttacgttttatcttttcggactgaattttgatcagggtggatttgcttcttttgtattactttgcggtattacagtgaatgccagtatttatattctaaatgaatataatgcgataagaaaaagatatcctctgttattaccggcacgtgcttttaccaaagcatggaattcgaagattctgcctatttttctgacggttgtttctactattctggggtttattccttttatggtgggggatggaaaagaggctttctggtttcctttggcggcaggtactataggcgggttagttatgtctatacttggaatatttttgtttctgcctatattctcattgaagaaacaaaaaagataatgaagaatttacttttctttctcgatagaagtgtttacttttgttgttacaaaaagcattaaataaatattatctaatactcgctaatcatgttaactcaaattattaacggcaagatttttactccgcaaggttggttggacgaaggctctgtactgatacgggataataaaatattggaagtgactaactgtgacctggcactgatcggtgcgaaactgattgatgctaaagggatgtatattgtacccggatatgtgtgtatgcatgctcatggcggtggtggccacgattttaatgaatgtacggaagaggcgttccgtgcagcgataaaagcccatcagaaacatggagcgaccagtattttcccaactttgtcttcttctcctttttctgaaatccgtaaggcggtaactgtgtgcgaaactttgatgaacgagaaggatagtcctgtcttggggttgcatgtagaaggcccttacctgaatccgaaaagagcaggtgagcagtttgccgggaaattgaagaatcctgataaagaggaatatacttctttattggaaagtactgactgcatcaagcgttgggatgcttcacctgaacttccgggtgcgttggaatttgcccgctatttgaagtcaaaaggagtattagtggctgtgtcacatacagaatcagaatacgaggggataaaagctgcgtttgaagccgggtttactcatactgcccatttctataacggcatgccgggattccataaatgtcgtgaatataaatacgaagggacagtggaaagtgtttatctgacagacggaatgactatcgaattgattgctgacggtatccatttacctgctactattcttcggttggcttataaattgaagagagtggaaaaaacttgtttggttacggatgctttggcatatgccgctgctgatggaatggaaataacagatcctaatgtaattattgaggatggtgtgtgcaaaatggctgatcattcttcattggcaggtagtatagcaaccatggatgtattagtacgaacaatggtaaaagctggtattccgctggctgacgccgtacggatggcttctgaaactccggcacgaattatgggagtggatgaccggaagggggcattgcagaaagatatggatgccgatgtgttgattttggatagagaactgaatatccgggcggcttgggctatgggcaggttggtggaggatacgaatacgttgttttaatttcttatattgattggcaagatgccttgattgttatagaaaacggtcaaggcatcttttttattagctctttttatacgatatcataagaaaaaacataaatttgctacactttaatcttagattatttacaatgatgaacatacgagtaaaattattggtcgctattatattatatcagttttttttgtttgtgcacgcacaaggattaattgatgtacggcattattctatagaagatggtctgtcacaaaatatagtacaagatatgcttcaagatgatgatggatatatctggttggccacttggaatgggttggaaaaatatgatggatatactttcaaaaattataagtcatatcctacagatgcaataaaattgaaatataatagaatggtgcaggtgattaaaggtagtgatcatacattatggtgccatacatatgacgataaggtctacctgtttgatactcaacgggaaagatttgaagatgtctttgtttatcatccccaaatagaggaatgtgatttggtggaaaaactaattccattaaataatggaattgtttgggttgttgcctctgatggaaatctgtggcgtattgatgaggctgattatcagaaagataatggggttatatttctgtcgtcgggttctgttccacaacatggaaatcatgtctattcagttgtattggatgcatataataatgagtggatattgacagataagggatgttttgtttatgggaaacgtgaactatcggacaaaagggattttaagtatgcagtatctttgaatcatcaattttatatggcaacttcatctggagaaattgtgttatatacttcgaaaggtggaataaaagaagtgaattttgaaaggatagattgggatattatgggactattggcattgaaagatggaaaaatgggagttataactaaaagaggagtcattgtggttgatacttataataaccatgtagaaaatattttgatagataagagtagttccgatatatcaccatccggattctttcagtcgacagataataaattatggatgtttaatggaaagtccaatgtcgtttgttgtgatttgaagcataataaaatagaatttgtgagctatccatttagtcagcgcgagaaaatgtataactttattcatgaggatagttatggacgtatctggattttagcttcaaatggtgaattttcattttataatcccacaaaaaatctttttgaacaaggttatacttatataaatggtgaaaaagtgtcttataaggctacaggtagaaaatttttagttgataatcagaagaatatatggctgagttgtgattctggggttgatatgattacgttcttgaatgaaaattacagttatttctcaatgaatcatcatgataaaatacgtgggttgtttgttgattccagacaaagagtgtggattgccgataaaagtaaacggatagaagtctatgatagagagcatcgttatataggtaacttgaatgaggcaggagatttggtgcaagacagacaagttatttttggtgctgatatttattgctttttcgaagatgaagctcatcgtttatggatggggagtagagagaacgggatttatgtggctgttcccgaagctgaaaaattccgtatttttcatttcaaacatgataagaaagataagagaagtctcagttcggatgctatttatgcttttggcaaagatatgaatggacatatttggattggtacttatggtggaggattaaacgttgttgacgggatttttcctgatttgcattttattcattctgataatggattagatctttatcctaaagatgaatgtagaaaagtgaggagcatatactgtacttcaacaggaattatgttggtggggacaactgatggactgttatctttttcagctaaaactgatgaatataggaaaatacaatttaatttgaatcactgtgaaactaagcgtgccaatagtcttagtaataatgacgtaatttatacttttgaaagtaagaaaggagaaatctatattataacccatagcagtggattgaatctggtaacgtctaaaaatttgttgtgcgacaatatagagtttgtgcatttgaataaacagaatggtttgccttcggatatggcctatacaatgatagaaggaaacagaaatgagctatggattagttttgaagatcagatttgtaggtataatcctgatagaggtagtatagagtcttataatcgtttttattttcattctcatttattagtttctgaaataccgttggtcagggatgacaaaaatggcatgtatgtggctttaaacagagatgttttatacttgcatttagataagttgaataaaagtagttttataccacatattgtctttacaaatgccagtactggtaaaaataacaaaatgggagattcttctcctattgtagatcagactttgactttagaaaaaaatgagaggaatgtttcgattacttttgcagcattggattttgccgcttcgggtaatttacaatatgcatatcgtctgaaaaatatagataaggaatggaattgtataggttatggtcattctgccagtttggttaatcttccggcaggggattttgtgttggaagtaaaatctactaatggagatggattatgggttgataatatggcccggttatttattcatgtaaaaccgactttttgggaaactgggtgggcatggttattatatgtcatattaattctattgataattgtcgctgtttctgtaactttagcttatatttttaatttaagacgaaaagtggactttgagcaacagataacaaacttgaaacttcgtttttttacagatatatctcatgaattacgtactccgttaactttaattgccagtcccattgaagaggtgatcgatcatgagaagttaagtgaggaaggtcgggagaatatgttgatagcaaaaaagaatacagaccgtatgttacgccttatcaaccaattacttgattttaggaaaatacagaataacaaaatgaaattgtatattgaagaaacagatatagtatccttgtctaaaaaaatctttgaaacttttaccgctttggcacatcagcggaatattaattttcagtttatttgttcctgtgatagttatgtgctttatactgatattgataaatttgaaaaaatagtgtttaatctattgtcaaatgcatttaagtatactcccgacggcaagaatatcgattttattcttgaacctcaaaatgatgttttctttttcaaagtcagagatgaaggtaatggtattgaactgcaaaaaatagatatgttatttaaacgttttgaaactttgggatatacagaccctaatttttcaagcgggattggcctttccttggtaaaagaattggttgatatgctacatggttctatcatggtggatagtaaattaggacaggggagtgtgttctctgtttctttgtcaagaagctatgaagttttccaatcagacaagaatgtggaattcattttgaatgacagcaaaacaatgccttcaattgagacacaagtagaacaaaaagaagaatttataaaagatataacagtcttggtagtggatgataatgaagaactaagacattttattgtaagtattcttcgtaaggagtatcatataatagaagcggagaatggaaaaaagggacttgaaataataaggttagaattaccggacttggtacttagtgacgtgatgatgccttgtatggatggtattgaattattggaagaagtgaaaaagaatcatgataccagtcatataccttttgttttgttatcggcaaaatctgcgttggatgatcgtatcagaggattggaatatggtgcggatgattatataactaaaccatttagttccggatatttacgtgcccgtatttcttctttgttgaagcaacgcgaaatgttacatgattattttatgaaacaagcattcaggtcttttgaacaggagaatttggtagcttcgagtgtttctttggatagtttctctccttcaatacctcaaataacttcttttgatgaggtatttattcagagagtgattcaggttgtggaatccaaactccaggaacaggactttaaaattgaggatctggctgatacgatgaaaatgggacgtactgttttttatcggaaggtaaagtctatattgggagtgacccctattgatttagtaaaggatatgcgggtgaagcgggccatacaattattggattcggggaattataatatatctcaagtagcctatatgagtggtttttcttctccccaatattttagtagggtatttaaggagttgaaaaattgtactccgagtgagtataaaacaaaagaggttgtgtcaaaatgctggcacaaccttttttatgcgcaaagcccagactttcccaagcccgggctttgttattacccaaagtttatgtaactttaggcataaagtttttcgttatggcaaagttacattttcgtccttacattcccaaccaaaccattctttttccacaaagaattgatgaaaacatagctgcggatgaccctgtccgcatagtcaatgcagttgttgataatctcaatcttgataatttcaagaagctttataaagaaacgggccgttgtgcttatcatcctaaaatgatgctcaaggtgattatctacgcctacatgaacaatatctattcttgtcgtaaaatagagaagcttcttttacgtgacattcattatatctggcttgccagtaatgagcatccggattttattaccatcaaccgtttccgtaaccgtgtaaaggaggaaattaacaacgtcttcacgcagttggttcttgtccttgccgacaagggtttcattagtcttgatgtagaatatatcgacggtacgaagattgagtccaaggccaacaaatatacttttgtctggcgtaagaccgttgagaggaaccgtacaaggttgctgaataagattcgtatccttctggagcaggtggatgaagccatagtacaggagagctctgtaaaagacacatccgtggagttgactccctccatgctctccggcatagtgaatgaacttaaagaagtgctggaacatcaacctgcaacacaggacaaggaacaaaagaaagccctgcgagaaaagaagaaacaagtcagggaacttgaagggtatcgtgacaagctgatggaatacgacaatcaccttgaagtccttggagaacgtaattcctattccaagaccgaccctgatgccacattcatgcgtatgaaagaagacgccatgaagaacggacagaccaagcccgggtataatttacaaacaggtactgaaaaccaattcatcatagacttccgactgtttcccaaccctaccgatacgctgaccctgattcctttcttccactccttccagtaccgctataaccgcttaccgggtatcggtgtggcagactccggttacggatcggaagaaaattaccggttcatgcaggaaaacgggatagaggcctttgtcaagtacaactacttccataaagaacagcgtccccgttatactcccaacccgttccatgcggaaagtctccattacaatgcgggggaggattattacgtttgtccgatggggcaacacatgaaacgtacaggaaccagacgtgacaaaacagcgagcgggtacatcaccgaaagtgcccggtataaagcacaaagatgcgaaggatgtcctttgcatggaagttgttttaaagcacgggggaaccgtatgatagaagtcaaccaccggttaaaccaatataaacggcaggcacgggaaaggttgctctcagaagaaggaatcaggcatagaggcaggcggtgtatagaaccggaagctgttttcggacaaatgaaatacaacatggcatacaggaggttccggcatgtgggaaaagacaaagtgacaatggactttgctttctttgctatagcgtttaatatcaaacagatgtgcgcaaaactgagaaaggtaggaaaggacttcattacacttgctaaatctatgtttattgggctatttataacccgatacaacaggaatatagcaacttgttaccgaatgaatgagaaaaaagccgcataggcaaaaggaaatatacgaagactgtaaatcatgaaaaaaaggttgtgtcagcattttgacacaacctcttttttatggtttggcataaaaagtacacagaatagcataaataatatacttttctatcaagtagtttaaaaaatacacggaacggcataaataatgcacgttccctttttacctctttgctatgtttgcaatgaaataattttaggttgccaaatggaatcttatataatagactatttaatataaagtactatgaagaaaattttaatctattgtgtgattgccttttctttttggagctgtaaatcagaaatacatactggtgcaacaccgaaaaggggattttatagtgacagaccggctaaaatttgggaggagtcactagttagtggaaatggtataatgggggctatggtgataggagatccatatcaggaatccattgttttaaatcatgctttgctttatttgcctattcattctgcaaggaaaccggtaggtcagggaaaatatttaggtaaaattcagcaaatgttgttggaggacaaatatatggaggcttctcagtttgttgtggatttggcaaactcagaagggtacaaagggaaacatgcaacagatctttttattcccgcttttcaattcaatcttttaggagatacttctactgtaaaacaatatgagagatcagtagattttacttcgggtgaggtaatagtaaattgggaagataataatggtgttttcacccgtaaattatttgtttcaagacctgataatcttgttgttttgaaattttcatcagacgaaggagcgtctattaatacaacattgagcctttcgaagataataaggcatgatgtgggccgtatcaagaagtttaatctggatgataacttttgtataaagaaggtcgaatccggaacaatggataatgggctttattttaaagcatggtatgaaagaccttgggagtttgaatctagaaaaagttttaaaggttacgaaggagtggtacaggttctacgttcggatggaaagatagaaatggattccgaccgattgatcctcagggatgccactgatgtgttaattgttgctcggattgagccttctgataatatggaggagtctcgggttcttgaaatgagtaatgcattaaaatcatatgatggaacttatgatgaattgctggcggtacataagaaaattcataaagaattgtttgaacgtgtttctattgatttggatgcatcagaagaggaccggatgaaatcttctgaagaattgttgaagttaggaggctctaatccggctcttgtagaaaaactttttgatgcggcacgttataatgtaattagtgcgacgggtattaatcctcctaatcttcaaggtatttggggggctactatgactcctccgtggtctggtgattatacgaccaatggtaatcttccggttgtcgtttcccattatcttcaggctaataccccggagttgatgttgcctttgttcgacaggctggaagcatatatggaggattttaaagtgaatgcgcgtgaactttttaattgtcagggtattcatgtcccttcacgttttagttcccatggtctgaataatcattttgatgctacatggccgatgacgttttggttagcaggagccgcatggtattcattgttctattatgattattatatgtacaccttggataaagattttttaagagagcgtgcgcttccgtttatggagcaggctgctttgttttatgaggatttcttaaaagaaggtaatgatggaaagtatatttttaacccttcatattctccagagaataatccggctaatagttcaagtcaggcatgtgtcaatgctactatggatgtaatggctgctaatgggttattgcgttctgttatagaagccagccagattttaggggtaaatcaagataagattccagtatggaaagcgatgcaggaaaaaatgccttcttatatgttgaatgaaaatggggaaatcagagagtggatgtggaaagatttgcaggataatcataaacaccgtcatgcttctcatttattcggattgtatgattttcatgatccgttgattatgggcaatcaagatttgatagaggggtgtaaacgcgctatcaatcgcagaatggaaatacggcgacaggataacggaggtatcatggcgtttgggatggttcagttggcatttgcggcatgtgctttaggagagacagaaatggcttatgatatgttggtctggcttggaaatagttattggaacaacaatttagtttcaactcatgaccctaagaaaacattcaatttggacatttgtgggggatatccgtcattagtgatgaagatgatggtttattctgaacctggtgtaatctctcttttaccttgtaagcctgttcaatggaagaatggtactataaaagggatagctttaagaggaggaatcctgttacaagaattagtatggcacgaaaaagaagtaaaagcaactttgttgtccaaaataaatcagactgtgaaaatccagttacaaggtatagataaacaggaaatagcgttgaaagcaggtgaacctgttaccgtggttttttaaattaaaagaatgttgaaaaattaccttatttactaattataaaaacactagtttatgaatcaaaaagtttgtattcaaagaatgtttatgtctttgatattcagtgttatgtatctgttatcttttgcacagacccgtcagatttccggtatggtaaaagatatgtcaggagaaccggttattggtgttaatgtttctgtgaaaggaacaggaaatggttctataacggatttggatggtaaatttaccataccaaatgtgaaggaaaaagatgttttggttgtttcttacattgggtatctcactcagtctgtctctgtgggaaaacaaacatctttcataattacattgaaagaggacactcaagctttggatgaggtcgttgttgttggttatggtgtacaaaagaaaagagatctttcaggtgcagtatcttctgtaaagtctcgggatattactgctattcctactacaaatgctttagaggctttgcaaggaaaagtagcaggattggatttaacagcttcttctggtaaagctggagcagatttgagttttactattcgtggtgaaagatctttgaaggctagtaatgcacctctgattttagttgatggtatagattatggtacaactttggatattaatccttctgatatagaatctattgaggtattgaaagatgcttcttcgactgctatttatggaacacgtggtgctaatggtattattatcgttacaactaaaaaaggtaaagctggaaaatcaaaggtttctttgaacgcttttgcttccattaatatgatttcgtcttatccctctattatgaacggagctgaatatgctcagttaaagcgtgaagcatatcgtgaccagacaactaatgaatatttaccagatgagcaagtctttacggtagcacaggaattagagtatgtacgagaaggagtttctacagattatagagatttaatgatgagtaatggatttaatcagaattatgaattgtctataacaggaggtacagagaaaacacaacattctatttctttaggatacagaggcgaaaatggactttttaaaaatgataattataaacgcttgaatgctagagtggcattagatcataaactattagaaaacttgaagattggtactaatattacttatacatacaaagatcaaaacacgcgtcgtgatcctttgaatatgtgtaataagattgtgcctttgtcaaaaccttatgatgaaaatggagaagtagtaagatttcctgctccgggatataattctcaaactaatccgttagtggatgatgtagatggagctgtaaaagataatacaaaagcaacccgttttttcggtagtctatatgcgaattggaatatcacaaaagatttgctttttagaacaactttaggtgtggatgtaagaaataagagaaggggatattattgttctgcaaattctttggatggagaaggtaaggatagtaaatcattaaaagagcatactatagaatcgggtataacttgggaaaatgttctgacttattctaaaattttaggtgaacatgattttcagataatgggtggtacaagtactatttataaaagtaaggagtacactttggcttcaggtaaaggacagacatatggaggaaatatctatcataatttggcatcgaataccaaggaagtcatgattgacagctatttaaatgaggaaaaattagcttcttttttcgggcgcgtaaactataagtttatggatcgttatattcttacagcgtcattacgtgcggacggttcttcattattagccgatggacataaatgggggtatttcccatctgtagcggtggcatggagaatgaatgaagaaagttttttgaaaggttttgacgaactgtcaaatttaaaacttcgtttgagttggggagagtcagggcaatcggctattgatccttatcagactgtcgggcttttaggttcgtccacttattcatttaacaatgatttggctagtgggctgtatcctaaaacgatgtcgaataaaaatctgacttgggaaacaacttctgtgtttgatctaggtgtggatttcggtttctttaataaccgtctttcaggttctgtagatgtatataaatcatatactagaaatgtattgatgaatcgtaagattccatcaaccaatgggtataccgaagttatggaaaatattggtaaaacagaaaattttggtattgatgtggcgttgaactctgtaaacattcaaaagaagaattttacttggactacagattttactctttctcacaataaagagaaaattaaggaattggcttcaggagcactgagagatgaggcaaactcatggtttgtaggtgaagcgtttcaggtcttttatgattataaaaagataggaatctggcaactggatgaagcggatgaagctgctaaaaatggacagaaacctggagatattaagattcaggatacggatggtaatggtgaaataactcccgaagaccgtgtgatttatagtaaacgtcctaaagttacttttggtataaataactcatttaccattcatgactttgaattttcgttctttatttatagtcgtttaggtcaatggattgattacgagttcaatagaggatataaaccggatggattggaaaatagttctaatgtggattactggactccggaaaatccaactaataatttcccacgtcccaatcggttttatgggtttggaaaaactagatattcctcaactttgaaatatgaaaaagggtcgtttgttaaggtgagggatgtaaccctggcctataatatcccttcaaaagtattggctagtttaggtttgggacgtgcacgtatctatgcaactgcaaaaaatttctttaccttcagcagcattgataattacgatccagaacgagggggaggaatttcatttccgatgaccaaacagcttgtttttggtgtgaacttggatttttgatagagtgtataatattaaaagaaagtaattatgaagaaaaatatatttgtattgacatctttgatgctaactctaggatgtggttgtgatagtttcttggatgaaacgaattatagtgatgtgacttcagaaggaggttattatgacacggaagcaggattgaatgctgtagttaatgcttgttatactcctttacgcttttgggcgggaaaagaggatgcgattgggctaagtgagactggaactgatattattgcggctggttcgggatgcgtggataataatatggcggcatatacccagtctttggatggaacaaattctgcctgtactttttattttgaccgtttttatgcagcgataaattggtgtaatacagcaatatttcatgcacaaacagtgccgaatccatccaatgatgagatattggcaacaactttgaataagcgtgaggcggaagcaagagttttacgtacattctattattggatattgactgaaacatttggagatacctattatacggaccagccttctaccagtatagtaatgaacccggtaaaaacttctacagataatatctaccaatatatgtttgatgatttggattgggctatcaaaagcaagttgtcaactttgcaaaatgatggtggacgggttaccatctggactgcgaaagctttaaaagctagacttttattaactagagcaagtgaaaagaacgatgtggacatgtatggacaggcatacgatttggctaaagatgtgatagaaaatggtccgtttgaattagctgaagattttgcttcaatatgggacatgaagaatagtgatggaaactctaataaagaagtgatatggtatgtagattattcgacaaatcagttgtataattctgaattggatgataaacctgttatcagaaacggagggaataatgcacatttgcttttttgtatgaagtatgatgatcaaccgggtatgacacgtacagcagaatatggtcgtccatttaaccgatatatgccaactcgttatttggtggatttgtttgatgaggaaaaagaccagcgttatgctggtagttttcgtaatttatggattatgaataatgagaagggaaaaggtaaatatactgcaatgactgatactgctatttatataattaaaggggaggcaactaaagctcaacgggcatgggcagaaaatcgttatcagctttttgatagaaatgatgtgtataatgcagatggttcgacaaagaatatgaagcaatatttggagttgagtaaatttgcagatcctactcgtgcgtcaaaagatgaagatagaagtactcgtgacggcttcatgattcgtattgctgaaatgtatcttattgcagcagaggcgggagctaaagcaaataaagcggatgctttggattatatgaataaattgcgtatgactcgtgccatatccggatatgaagatgcgatgcgtgttgagttgtcacaaatacaagatattgattttatactggatgaacgtgcacgggagttggctggagagcagttgcgttggtttgatttgaaacgatttggtaaagaacagtttgtaaaaagaataaaaaagtgtaatcctgatgctgcaaatgtggatgaacatcattgggtacgtccattccctcagacatttttggacgctattgaaaataaaacggaatttactcaaaatacaggttataaataatgaagaaatatattatagctttttgcttggtgggaatgagcggaggattagtttttgctcaagactatgtttcaaaagtatgggtgtcagaccaaggtgatggaacttataaaaatccagtactttatgcggattattctgatcctgacgcatgtagggttggagatgattattatttgacttcatcgagttttggttgtttacccggtttgcaaatattacattccaaggatttggtgaattggagtatcattggtgcggcattaccttatgccgtacctcccataaacgataattctccccagcatggaaatcgtgtatgggctcctagcatccgctatcataacggggaattttatattttttggggagatcccgatcaaggagtttatatggtgaaatcctcaagagcggaaggtccttggagcgagccggttttagtaaaatcaggtaaaggaatcattgatacaacgcctctttgggatgatgatgggcgagtgtacatggtacatgcttatgcaggtagtcgtgccggtttaaaaagtgtcatagccatttgtgaattaaatgctgaagcaactcaagctattacccagtctcgtatcatttttgacgggcatgaagctcatgaaacttgtgaaggacccaaattttataaacgtaatggatattattatattttccatccggctggtggtgtggctactgggtggcaggtagtgttacgttcgaaaaatatctatggaccttatgagtggaaaactgtattgactcaaggagaaacaaagataaacgggcctcatcaaggggcgtgggtggacactactacaggagaagactggtttttacattttcaagatgtaggtgcacatggtcgtttgcttcatcttcagcctatgaaatgggtggatgactggcctgtcataggaatagataaagatgaagatggttgcggagaaccggtattattctataagaaaccagatgttggtaaaaagtactctgtttgtactcctcaggaaagtgatgagtttaatagtcagaatttgtctccacaatggcagtggaatgctaatatcaacgaaaaatggatgttttgtaatggacaaaatggatatatacgtctttattcttatcctgttacagatagttataggaatttatgggatgtcccaaatttgttgttacaaaagatttctgctcctaattttacagcaacgactaaattaacttttaaacccactaagaaatatacaggtgagcgtacaggattagttgtaatgggattggattatgcaggattgttcgtggagaatactaaagatgggctggtactgtctcagtctgtgtgtgatgaggctgaccggggtagtctggaaaaaaccaatgcatccgtttctttggaagggaatacggtttatctgaaatcaacattctccacaatggacagaaaaaatgctggtaatgaaggaggatatgatttggtggtgatgtgtaaatttagttatagtatggatggaatgacttatagatcgttaggtattccgttccgagtgaaagaaggtagatggattggtgctaaaacaggtttattttgtactcgtccgtctattcaaacgaatgatggcggttggactgatgtggattggtttaggataggcaaataagataggcaaggggaaaagttacaatgataattagattattatggggacttaaatgaagcctgctaggctaaaatagaaaagtactgtttctgttttgggaatagtacttttttatattggctatagcagagaatattggagagttttctttttttcaagtttaactcgtcattatcaagaggatttgctacatttgcaacttgttgaaatgagaaccaaataataaaaaacgatatgaacgaagattttagagaggatttgaagaaagcctgtgaagtgatgcagaagggaggagtgattctttatcctactgatactatttggggaataggttgtgatgcaactaatccgaaggcggtaaaacgagtttatgatataaagaagcgtgctgatagtaaagcgatgcttgtattggtggacagtacggtaaaagtaaatttttatgttagtgatgtacctgcggtagcttgggatttgattgagtttgccacaaaaccattgactattatttatgatggggcacgtaatctggcagagaatttgctggctgaggatggcagtgttggtattcgtgttacggctgaggaattctccaaacaactttgtttccgatttcgtaaagctattgtgtcgacttctgccaatatcagcggtcagccttcacctgccaacttcagtgaaatcagtgaagaagtaaaacaagctgtagactatattgtggagtatagacaagatgaagtgggacatcccaaaccatccagcattatcaaactgggtaaagggggagaagtgaagattattagagagtaaaaaaaggaatggacgcaattatagatgaaaataagaaaagttggttacagcgctttatcttatggcgcgaaaagaagataagagagaaacactttattcttatattaagttttcttgctggtatttttacggcattggccgcgtggtttttgaagtttctagtagaatggatcaaggaatttctgactgaaaattttgattctacaggagtcaactggttgtatttggtgtatccggtttttggaatctttcttaccggattgttcattcgttatattgtgaaagatgacatcagtcatggggtgacgaaaatattatatgccatatcccgtcgtcaaagccgcatcaagcggcataatacatggtcgtctgtgatagctagtgccattactatcggttttggtggttccgtaggtgcagaggctccgattgtgttgaccggatcggctatcggttctaatttgggaagtgtattcaagatggagcataaaactctgatgctgttggtggggtgtggtgcggcaggtgctgtggcaggtatttttaaggctcctattgcaggcttggtttttactttggaagtcttgatgattgatttgacgatggcatcattgttgcctcttcttgtttcctgtgtcacggcagctactgtttcttatattcttaccggtcccgatgccatgttcaagttccatatggatgaaccgtttttgatggagcgcattccttcggcaattctgttaggcattgcgtgcggattggtttctttgtattttacgcgggctatgaattctgtggagaatatatttcgtcgatataataatccgtatatcaagctggctataggcggtgcaatgctgagcatattgattttcttatttcctccattatatggtgaagggtatgatactattaatttattgctgaatggcgtaaccaatcatgactggaatacagtaatgaataactctatcttttatgggttcgataatttgttactagtctatttggccatgattgtacttttcaaagtctttgcttccagtgcaacgaatggcggtggtggttgtgggggtatttttgctcccagtttgttcttggggtgtatcaccgggttcatcttcgctcatttttgtaatgaactgcatataggtccttatattccggagaaaaattttgctttgttgggaatggcgggattgatgtcgggagtaatgcatgctccgctgacaggtatttttctgattgcagaattgactggtgggtatgatttgttccttccgctgatgatggtatctgtcagttcttatcttaccattatgatattcgagccacatagtatttattctatgcgtttggctaagaaaggtgaattgataacacatcataaagacaaggccgtattgactttgatgaatattgacagtgtggttgaaactgattttgagaaagtgcgtcctgatatggatttaggtgaaatggttaaagtcatttcgcaggctaaacgcaatttgtttccggtagtggatgtcaatggagaacttttgggcattgtggtattggatgatatccgtaatattatgttccgtcaggaattataccatcgtttcaaggtagaaaaatttatgatttctcctccggcacggatcaatgttactgattcaatggaagaagtgatgaagaagtttgatgatacaaaggcctggaacctgcctgtgattgatgaagagggaaaatacaaagggtttgtttccaagtcgaaaatatttaattcgtaccggcaggtattggttgatttctctgaagattaaataatgtaagtatatggaaaagaaagatttgcggatcgtatatatgggtactcccgattttgcggtggagagcctgaaaagattggttgaaggaggctacaatgtagtaggtgtgataactatgcccgacaaaccgatgggacgacatggcagtgtgctacaacctagtccggtgaaagaatatgctgtttctcaaggtctgagggtacttcagccggagaaattgaaggatgaggcttttgtagaggaactccggtctttacaagccgatttacaaattgtagttgctttccgtatgcttcccgaaatagtatggaatatgccgcgtttgggcacatttaacttgcatgcatctttattacctcaatatagaggagctgctcctattaattgggcggtgataaacggagatacggaaactggtattacgactttcttcttgaaacatgagatagataccggtgagattatccagcaggtgcgtgttcctattgctgatacggataatgtggaaatagtacatgataagctgatgtatttggggggagatttggttttggaaaccgtggatgctattttggatggaagtgtgaaacctgttcctcaggaaaatttgatccggcaggaaacggaattgcgcccggcgccgaaaatatttaaagagacctgccgtatagactggaataaaggtgtgaagcagatttatgactttattcgtgggctatctccttatccggctgcatggaccgagctttgtgtggctgatggaacacgtcaggttttgaaaatatatgaaacggagaaagtttttgtttcccatgagatgaatataggcgatatccgtacggatatgaagacttattttcaggtggctgtaaaagatggttttattaatgtgcttattttgcagctggcaggaaagaaacgtatgaatgtggctgattttttgagaggctacagaacttcggataataataaggtggaataaatgatacgttagtatgtgtgttgctgatgtattaacggtataatcttagtacactataagtcggtataaatgataaaggctgtatcgaaagattttcggatacagccttttcgttacaataagacagacaaggagttgttaagaatcatttaatttttgtgttggatatatctttctgtatgaacggaaagtttgtagatttacttttattataacttactgtaacggtttcttcgccattgttaatggtattcatttttattttaaatccttgtagcttaccctctttatatccgggaacatccaataaagggaaggatacataaccgggactcggatattcctgtctgtcaccttcggcattgtggcgtaattctacggccatatatccgtttgcgtcaggaacggttccttctgtggctacaaggctgatccgatgtttgatattagagttgaaacctaatatttggaacataagggtcaggtgtgtcttacccataatgggagtgatgaggttgattccatcatgtccgtaaatatcttcatcgttttcttttagtgtatccattggtttggttaagatcttctgcaagtaatctatagaaataaaaggtcctttcttacttgcatctccggtcggattggctgcatttatataggtataaaaaatacgttgtcccggattatttgtttcaaaacgtgttaatttatcgggattcactacgtatgcgattccatcattatcgctttctatcactgcttcaccgggtacttcactgggagttactacggttgctaaagcggcgttaaaaggcatttctgcttgtatgtcgtagatgtcatcatcatagtcattcaggcaagactgagtaaatggaatcagcattaccataattattacaagaactgtcgctttatattttctcatattttctgtttctagaattgtttctatcgcttaaatgcgaagatagtaagtttactgcttgtaaaaatgttaaatctgcttaagcaaaaattttattcttccggatgcagtatttttgcagtcttatcatttattcaataaagaagtgtcacaaacaatgaatgaaacagaattggtggaacgttgcggcaagggcgataaccttgcacgcaagcaattgtatgagcgttatgccgggcaattgatggccatttgtgttcgttatacaggtgatagggaagtggcacaggatgtcttacatgatggatttttgaatatatttcgttcattcagtcaatttacttataaaggagaggggtcattgaaagcatggctggcacgtattatggtaaatgaagcattgggctatcttcgcaagaaagcttctaccaatcaggaagtgatagtcgaagagttacccgatgtgatagatggagatgaggatgattttgagcaaataccccaatctgttttaatgcaattcattaaagaacttccggatggatatagaacggtctttaatttatatgtattagaagaaaagggacataaggagattgctgaaatgctaggaattacagaacatacttcatcgtctcaattatatagagccaaaaccttattaatgaaaaaaataaatgattatagaaagaggatataggaatgaaagaaaaagataaatggataaaaaatttccgcactcggatggaaggctattcggaaccggctcctgctgatctttgggaacagttggaaaaggagctggatacggttccgaaagtaattccgatgtggcgccgctggcaggctgcagcagctgttgctttgttagtggttgtgtcttcattgactgtatggttttggcagtcaccttcagcaaactatttggagcaacaatcggcagggttgaatgtaatgcacgaacccgatgagttggtgccgggatcaatcactcctgagcaacctatggccttggtagttcctgctgcccgttctgaggaaaagaaacatgtaaaagttgttcggtctgttacggcaaaggcgttagccgccgaacaggaggttttgctaaataaagaggtagaagagatacagatagaggaaaattatattgaagagcaaaaagaggaatctgttatagtggaacaaaaacaacagaaacaggccggcagatcttcctattcggctgccaaaacgaattacgcttatgtggctcctcatagaaagaaggacagaaactggtcgataggactttctaccggtaatggaaccttttcatcctcgactagtatggatggatatttgcctttgcctaatggtgcaaggaacgcaacaatgaatagtgcttatggagtggaaacaagggctgaaattgataagctggttcaattcaataacttgtcggaaggacagaatgcgcagtctgatataaaatatcgtatgcctgttacttttggagcttcccttcgttttgatttaagtgatgattgggctgtagaaactggggtgacttatacccagctttcatccgaaacacgttcgggaactcaaaaaaacaattatggctgggaagagaaactgcattatgtgggtattcctttgaaagtgaaccggaatatatggagtaacaagcggtttgaagtgtatgcttcggcaggtggagcggtagaaaaatgtgtatctggaaagcgaagcattatcggcagtgtttctacatcaaatgcaggaaaagatgaacaattttcgggaggggaagaagatgtcaaagtgaaacctttgcaatggtctttgtccgcagcggcaggtgcgcagtttaagattacagagaaattgggtatttatgcggagccgggagttgtttattactttgatgacggcagtaatgtaaatacgattcgcaaagaacatccttttaattttaatatacagttgggtgtgcggtttactttgccgaaataaaatgaattttttcactgttcttatataaaatatggttatctttgttctgtataaaaagaataagaacagtgaaccatgaatagacctctgatatccccttctttattgtctgccaattttgctaatctacaggcagacatagaacaaataaatcgtagtgatgccgactggttgcatattgatataatggatggtgtgtttgtaccgaatatttcttttggttttcctgtattgaaatatgtagccgagttgtgtgaaaaacctttggatgtacatttgatgattgttaatcccgagaaattcattaaagaagtgaaagatttgggaacaatgatgatgaatgtgcattatgaagcttgtgtacatttgcatagagtggtgcaacaaataaaggatgccggaatgaaagcggctgtcacattgaatccgtctactcctgtggctatgttggtcgatattatccgtgacgtggatatggtgttgctgatgagtgtgaatcccggttttggtggtcagaaatttattgtacatactttggataaggtgagggaattacgtgaattgataacgcatacaggttcacgggctttgatagaggttgacgggggggtgaacctggaaactggcagacagcttgtagaggctggtgcagacgtgctggtggcaggaaatgctgtgttcaaagctcctgatatgtcagacatgatacatcggttgaaatctctttgaacttaaaaccaaagtgcgaaatatagcggctgtaaagccttgttccatgttccggttgactatacctctagtcgccggaatttttgtatccgatcatttttttcaaggtgccttgcctgtgcttgtttttggcatgggaatattggggtgcttgattggtttgattgtattggtgaaatggcaaggctacctttcccgatggttatttggaggcatggtttttatgtttctattttgtgtaggggcattgttgctacagcaaaaatggcaacgggtggactatgaatggtcatcagggaagaatatgtatcaaggggtgatagtggatgttccacaagaaaaggcaaaaacatatctctgtaaattgcggatagataaagaaatgtctgagagggggatagttcctgttaatcgtatgatactagtctatattatgaaagatagtctttctgtaaatttacgatgtggagaccatttgaacttttatacacgtatctcgactcctgaaagagaggtgattccgggagaatttgattatgcggcttatcttttcagacagcaaattagcggaacggccgtaatctttccggggtattggcaatggacaggcaagaaatcggcattgacatggaaacagcggacaggtgtatggagagagaaaatactgaacagttatcggaagtggggattctcgggagatgaatttgccgtattgtcggctttgactgttggctataaggaggaactgagtgaggatttacgtgaaacttatcaagtggcgggagtgagccatatcttggctttgtcaggaatgcatatagctgttttgtggggattattgtgttggatattgcgtccgctggatagaagttgcctgctgcgatgggtaaagtgtggcattattgtgttgttgttatggacatttgcttttttagtgggcttgcctccctcggttatacgggcggtggtaatgtgtatgttaatgacagtggcacgtgcggcaggagaacggactttgtcattgaatactttggctatagcggcattctttatgctgctttataatcctttttatctttttgataccgggttccagctatcatttctggctgtattttcaattttgtttatttatcctgtcatttttcggtgctggcgggtgcatcaccctgtacctcgttatatttgggggatagtggcggtttcgctggcggcacagttagggacagctcctgtggttatttataaattcgcttattttcctgtttgttttttaccggccaatttgatagtggcacctttagtatttgttataatttatggatcggtagcaagttttgtgttgtctccttttacggtattgcatatatgggtggtaaaaggattgaacggggtgttgtggttgctgaataacagtatgcaatgggtgggggatttgcctatatcacattccggcgatatacatttgtctttgtttcaggttggtattctttatgtattattatttgtgttattatcttatctgttatctccttcacggaaattgttgattactgttttgtgtggaatcaatttttttataggattttcaggttgtctatattatatgaaagaggagtcttttcagttaatcctggctcattcgcaagtaaaagtttgtcctcaaaaagatgtttggcaacaggatagcatttatcattataaaggtctgaatatatgtgttttggttgataaccgctggcggagcagatcggttgattgtttgttggatattgattatatgtacttgtgtaaaggttttaaaggaaaaattgccccattacaaaaaatatttaaaattaggaaggtcatactggatgcttcgctcggtgggtatagattgaatttgttaaaggacgagtgtagaggtttgggattggattatattgatatatctccgaaaggttcttaccatattcttctgtgaataaagaattaatttgtaaatttgccatttcaaaagaaaaagattgaatatgttatcaaaagtaattgcacaggctaatatagaccatgccgaaaaatggtttgaaagagctgataaaatagttattgttacccatgtgtcaccggatggtgatgccattggctcctcattaggattatggcattttttagaatcacaggaaaaaacggtgaatgtcattgttcccaatgcttttccggattttttgagatggatgccgggagccaaggatataatccggtacgataaatatactgaatttgccaataagctgctgaatgaggcagatgtgatctgttgtctggatttcaatgctttgtctcgtattgatgcgatggcggatgctgtggctcagtcgccggcacgtaaaatgatgattgaccatcatcttaatccggaagccttttgtaaaatcattatttctcatcctgaaatatcttctacatcggaattggttttccggttgatatgccgtctggggtattttgaggatatcaccaaagaaggtgctgaatgtatttatacggggatgatgaccgatacaggtggctttacttataattctaatgaccgtgaaatttatttcattattagtgaactgctttcaaaaggcattgataaggatgagatttatcgtaaagtttataatacatattctgagggacgtttacgcctgatgggatatgtgctgtacgacaagatgcaagtattccctcagttcaattcggcattgatttggctgacaaaagaggaacaaagtaaattccagtatgtaaaaggagatacggaagggtttgtgaatattccgctttccataaagaatattattttctccgtattcttgcgtgaggatacggaaaagaatatgataaaggtatctctgcgttctgtaggtactttcccttgtaataaagtggctgccgaattttttaatggaggtggtcatttgaatgcatccggtggtgagttttatggtacaatggatgaagctatcgatctgtttaaacaggctttggtgaaatacgaggaactgcttctggcaaaaaaatagttattttagtataattgcatacaaacaatataaaagttaggggcttatttattaattttgcccgaaaataacagaacttagaatgaagaaattaggtatattgttcgcatctgtgtttcttttagggctggtcttccagtcttgcaataatggaaagacctatgctgaaatgaaagaagaagagagagaagctatcaaacgatttattgaacgggaagatatcaatgtgatcagctttgaacagtttcaggaacaggattctacaaccaatgtggatgaaaaccagtttgtccttttctcggaaacaggtgtttatatgcagattgtggcagaaggaaatggtgagcgtttgaaagacggtcgctatgagattctggcccggtatgtggaggaacagattacttcggatggaatagattctttgtcttggaatacagactatgggaattctcaaatggtttatccggatgctatgatgctgacaaaaagtggaaaatctttttcagctacattcacctccggtataatgtatacagtttgggggacaccttatgtaccttcaggatggttgattccattcaattacataaaggtcggcagggagatttccggtcgttctaaggtcagactgattgtacctcacagtgaaggacaatctgacgcttctgcttctgtctatccttgttactatgaaataacttatcaattagcacgatgacattaattaaatcaatatccggaattcgtggaaccattggaggacacgtgggggaaggtttgaacccgctggatatagtgaaatttacatcagcttatgcaacgctgatacgtaaaacaactacagtaaagagcaataaaattgtagtaggacgtgacgcacgtatctccggcgaaatggtgaagaacgtggtatgcggtactttaatgggaatggggtttgatgtggtgaatatcggactggcatctacaccgactacagaactggctgtaaccatggaaggagcgtgcggtggtattattttgactgccagccacaatcccagacaatggaacgctttaaagttgctgaatgagcatggagaatttctgaataaagaagaaggaaatgaagtgctgcgtatagcagaagcggaagcgtttgaatttgccgatatcgaccacatcggaagttatcgcgaagacaatacctacaatcagaaacatatagatagtgttttggctttgaaattggtagacgtggatgctatccgtaaggccaatttccgtgtagctatagattgcgttaattcagttggcggtattattcttcctgaattgttggaacgattgggagtgaagcatgtagaaaagctctattgtgaagcgaccggtgattttcagcataatccggaacccttggaaaagaatctgggggatattatggggttgatggccaaaggcggttgtgacgtggcttttgttgtagacccggatgttgaccgtctggctatgatctgtgaggatggaaaaatgtatggcgaagaatatacattggtgaccgtggcagactatgtattgaaacatactcccggaaataccgtttctaacttgagttctacccgtgctttgcgcgatgtaacccgtaaatatggttgcgaatacaatgcttcggctgtaggggaagtgaatgtggttaccaagatgaaagcgactcatgcagtgattggaggtgaaggaaatggtggagtaatctatcctgaaagccattacggacgtgatgcattggtgggaattgctttattcctgagccatttggcacacgaagggaagaaagtcagtgaactgcgtgctacttatcctccttatttcattgccaagaatcgcattgatctgactccggaaacggatgtggacgctattttggccaaaataaaggaactgtataaggatgaagagataaacgacatagacggtgtgaaaatcgatttcccagacaagtgggtacatttgcgtaagagtaatactgaacctattatccgtgtttattctgaggctgcaaccatggaagcggcagatgaaataggccagaagataatggatgtggtttatagcttggcgaaataaatacattattaatagataaattagccgtattgaatgagattatatttcgtttgatacggcattgtttttttatcagatagaaataaatactatgagaaaaagccttttatttgtttgggcctgtatggggctggtttgtttggtgagtgcttgtaagacatcggttaaaagtaaagaatggaagctggtatgggtggagaattttgatcaaaaaaacagttttgacgaatcggtatggactaagatacctcgcggaacatccgattggaacaactatatgtcttattatgattcatgttatgctatgcaggatgggaatctgatacttcgtggaatagccaatcatactcaaaaaaatgatacggctccttatctgacgggaggtgtctataccaaaggaaagaaattgtttacagggggaagagtggagatacgtgctaaattgcaagccgctaagggggcatggccggctatatggatgcttcccgaaaaagcggagtggcccaaaggaggtgagattgatattatggaacggttgaatcatgatcgtattgcttatcagactacccattcttactatacacatgtcttaggtataaaggataatccgcctcacggaggtattaataagataaatcctgaggaatacaatatctattcggtagatatttatccggatagcctggtgtttgctgtcaatcatcgtcatacctatacttatccgcgcattgatacggacaaggaagggcagttccctttctatcaaccttactatttattgatagatatgcagttgggcggttcatgggttggcgctgtggacccgaaagaattacctgtggaaatgtgggtggactgggtgaagtattacgagaaacgctaaatgctgtttgtcgggaaacgggggctgttcaatgttgaacagccccccgttctgtttaattataaggtaaataggcctggatgtaacatcatcaaagaaaaatgttacaggcggagcacgtctgttctgcctgtaaagatgcgtgtatcattgtgattacaggaatcataaagctttgtgtacttttgtttcgtctggaataagattctaaagattggagcagggacaacattttgtttagctcatttttgttttcaataggcataaagtaattccagccaatggatggaattactttttatggaagatattttaatgtaataaccatgaatacacaaagtcaaaaagtttcgatggccgagaaaatcggttacagcctgggggattgctcggctaatctggtcttccagatgatgatgatttatcagacaaagttttatacggacatattcggtctggaaggtgccattgccggtacggtgatgttggtggcgcgtatcacggatgcctttgtcgatcctacagtggggttattgagtgaccgcaccaagacacgtttcgggaaatatcgtccgtgggtgctttggactgcgttgcctttcatggttttctatgtgttggctttctataatccgggcattgaagataaagggctggtagcattgtatgctacgctgtcttataccttgctgatgagcctttattcttttaacaatacgccgtatgcttctttgggcggagtgatgtccggtgatataaaggaacgtaccagtatcacttccattcgttttgtggcggctaccattgcccagtttgtggtgcagggacttacgctccctttggtaagcaagttttcggatggtggagacaaagcgcatggctggttatgtaccatctctttgttcgcttgtatcgggttcgtttttctggtcattactttcttttcaactcgtgagcgcatagagccgcctgccagtcaaaagacagatacgcgtcaggatataaaggatgtgtttggaagcgttccttggcgggctatgttcatacttacgcttttcatttttattacgcttgccatgtggggtagtgccatgaactattattttgagaattatgtggatgccggagcattgtatgcctttcttgaccgtctgggactggtggcaatggaaacggatggcagcgcggggtatgctgtgttgaatgctttcgggctggtagtcaattcttccgataaggcatacgaggtaggatttggagtgtttaatatgttgggagcacttgtccagttctttggggtgattctcttgtccggctttttggcaaatcgttatggtaagaaacgcgtttttatcgtttgcctctcacttacggccatttttacagctttgttctatttcccgggaaaagcggatgtggaaacgatgtttgtactgaatttcctgaagagtttggcatacgcgccgactgtacctttgttgtgggcgatgattgcggatgtagccgactattcagaatataaaaattaccgtcgcgccacaggctttgtgtttgctggtgtagtttttgccttgaaggccgggctgggtatcggtggggccatcctggggtttctgctttcaggatttgggtatgtgtccggtatcggggcagagcaaagcggtacggctataagggggattgtactttcctccagtctgattccggctatgatatttggaatgggagtagctaccttatgcttctatcctattacaaaaaaatacaacgaacagatgcaggcggaacttgctgaccgtcgcagtaaggccggttattaatgaaaaagaacaagttatttaccttaaaaactttgtaatatgaaaataagatatgtaacattattggctgccattgccggattaatggccgcttgcggcaatgaccggaaggccggtatgcagccggatccttcgctgaaggaagcagcttcgggcaagtttctgatgggggtagcgttgaatgtacgtcaggcagcaggtcaggatacttgcgcctcgaaagtggtaaaacgtcattttaattccattgtggccgagaattgcatgaaatgcgaagtgattcatccggaggaagaccattttgattttacggaagcggaccggttggttcgttttggcgaggagaacgatatggctgttatcgggcattgccttatctggcattcacagctggcaccttggttctgtgtggacgaacaaggaaaaacagtaagtgccgacatcttgaaggagcgtataaaaaaacatatccagactattgtgacgcactataaagggcgtataaagggctgggatgtgttgaatgaagccattgaatcggacggctcctggcgtaaatctcctttttacgagatattaggcgaagagtacatcccgcttatttttcagtatgctcatgaggcagatccggaagccgaactttactataatgattatggcatggacgggaaggctaagcgtgacaaagtagtcgaattggtaaagatgctgaaagaccgtggactgcgcatcgacgcggtaggtatgcagggacacatgggaatggattatccgtcagtgtccgaatttgaagccagtatactggcatttgcagctgccggagtaaaggtgatggtaaccgaatgggatatgagtgcattgcccacggcacggatgggagccaatatttcggacacggtgtcttataaacaatccctgaatccctatcccgacggtttgcccgactctgtgtctgtggcatggaataaccggatgaaggaatttttcggtcttttcctgaaacattcgaatatcattacccgtgtgacggcgtggggggtgacggacggtgactcatggaagaataatttccctgtgcccggacgtgtggattatcctttattgttcgaccgtgattgccggccgaaaccttttgtggaagaactgattggaaaacagaacatttaataacgtaacgatatggaaaagaaattcagatacttggtgcctggagactatatggcagatcctgccgtacatgtttttgacggaaagctttacatttatccttctcatgaccgcgagagcggagtggaggagaatgacaatggtgatcattttgacatgtgtgactatcatgtcttttctacagaagatgtgatgaacggaacagtgaccgatcacggagtcgtactgaaagtttcggatatcccttgggccgggcgtcagttgtgggattgtgatgtggctcgtaaaaacgggaactattatatgtattttccattgaaagaccggaacgacatcttccgtatcggcgtggcggtgagcgattgccccgaagggccgttcattccccagcccgatcccatgcgtggaagctacagtatagatccggcggtatttgatgatggtaatgggaactattatatgtatttcggcggtttatggggcgggcagcttcagcgttatcgcaacaacaaggcattggagtgtgcggcttttccggctgatggtgaaccggctttgccttcacgtgtggtgaaactttcggacgatatgcttcagtttgccgaagagccgcggcctttggttattctggatgaacacggatatccgttgactgccggtgacaatgcgcgccgctttttcgaggcttcatggatgcacaagtataacgggaaatattatttttcttattctacgggagacactcatctgctttgctatgccacaggagataatccgtatggtccgttcacttatcaaggggttattttgcagcctgtggtaggttggactactcatcatgccattgtagaatacaaaggaaaatggtatctgtttcaccacgattgtgtcccttcggggggaaccacttggttgcgcagcctgaaggtgtgcgaattggagtacgatgcggaagggaaaataaagaccatagaatctgtctaaaaataaatcagtgatacatcatccggacagattggaccggttgctttgccgggtattgtccaaacagaccgtttgcagagattccgttcgtcgtccgggacttacaaacggtctttttatatccgtgttcttcaattacagtatctggtggcgtaattataatttgttgtaatatagtatgttatgtatgtattgtaacgcaaataaagattcatgtaacacgtttgaagcaagatgtaactctacgaaagatgcgtgtatcatgcagagaatttatattcggcgacactttctatatttgcgtctgaaatccgtaaaggaattggtcaattataatactagaaagacaatgaaacaaaaacaaaagctgaaaagatggtcgggcgtgctgatcgctttaggggtgttgggctcctcctttacctcatgtagttcgatcaagaaaggaaatgatttgccagttgtaggaaagtctgtcgctcttttcgattactttaattataaaggtgaggatgatgtctatatttccaatccgcttccgggagatgattatttttataatcccattctgccgggatggtattccgatcccagcatttgcaccaatggcgaaggcgattattttctggctgtttccacctttacttattatccgggtgtgcctcttttccacagcaaggacttggtgaactggaagcaggtagggcatatcttgaatcgtccttctcaattagtcaacatggaggggcaacacgtaagcggaggaatttttgctccggccatatcctacaacccgcataacaagacttattatatggttactaccaatgtaggggccggaaacttctttgtgaagacacaagatccttttggcgaatggtctgatcctattatgttgcccgaagtgacaggcattgatccctctttctttttcgatgaagatgggaaggcctaccttgtcaataatgatgacgcgccggacaacaagcccgaatacagtggacatcgtaccatccgtgtgcaggaatttgatgtgaatgcggacaagacggtggggccgcgcaagattctggtgaacaagggagctcgtccggaggacaagcccatctggattgaaggtccgcacctttataaaataaacgggaactatttcctgatgtctgccgagggtggaacagccggatggcattcggaagtaattttccgtggtgattctccgacgggcaaattcataccgtggaagaataaccctattctgacccagcgtcagctggatgcggagcgtcccaatccggtgacgtgcgccggacatgccgacttggttcaaacccgggaaggggattggtgggcagtctttctggcttgccgtcccataaacaacacgttcgagaatttaggacgtgagacttttatgatgcccgtcaagtggagtgaggatggtttcccctatatgacgcagggggatgatctggtgccagtcattgtccgccgcgaaggagtgaagcgtgacgaatctgccaccttcggaaactttgaaatgaatgacggtttcgacggacaaacattgggtatggaatggatgactttgcgtgctcctgctaccggactttactcgctttcccagactccgggttatctcactttgaaatgtgattcagtcagtgcttccgaaaagaaggtgccggcttttatatgccgccggttgcagcatcataagttcgaatgcagcacgcgtatgttgttctgtccgcagagcaaggcggagcaagcgggcatattgttgttcaaggacgaaaagcatcaatatttcctggctgtaggcagggatgaccaaggtgaatgtatttccctcaggcagataggcgatggggaaagtaagatgctggcttccgttcgcttggacgacagaggagtgcttaccgacctgaaggtggtttcgcgcggaacacattatgatttctactatgctcgccaggaaggtgtgtggaacgtgttgtgcaggaacgtggacgccgggtatctgtcaacggccactgccggaggctttaccggaacaacgataggcatgtatgccaccttaaaataaatgactatttgattttttgtataacttaaattaatgtattaatgaaaaatgctatgaattttagaccggtggggctgatgcttctgttctgtctcattcctctgtgggcatttgcacagagcgtgatggtaaaaggtgtagtaaaggacacaagtggtgaagccatcatcggagccagtgtcttggaaaaaggcactaccaacggtacgattaccgattttgatggtaactttgcattgaatgtatcgaaaaacgccgtgttggtggtgagttttgtcggttacaagaacgaggaaatcccggtagcgggaaagagttctttaaagattacattgaaggaagattccaaagctttggaagaagtggtggtgattggttacggtagcgcccgcaagagtgacgtgaccggatctattgcatcggtaggcggagagaagctgcgtgagatgcctgccaccaatattacatacgctttgcagaaccgcgtggcaggtgtggatatggctcagacttcttccgcaccgggcgcttccatgcagattcgtattcgtggtacccgttcgttgaacgccagtaacgacccgttggtagtattagacggaatcccctttatgggtaatttgtccgatatcaatcccggagatatcaagagcatggatatcttgaaggatgcatcctctactgctatctacggttcgcgcggtgccaatggtgttatcctgatcactacacacaaaggtgcacagggtagtcccgcccggtttacttacaatgggtatgcaggtatgaagaaagtattctccaaatatcccatgatgaacggcagcaagtttgccgaaatgcgtaaactggcaggcaagttcgagaattcggtggacgagtcggacgatgtggatactgactggcaggacttgatgttccgagacggttatgtaaacagccacgatgtcagcgtgtccggtggtaccaacggtggaggctacagctttggcgcggcttactataaggatcagggtgtcattcctactcagaactatacccgttactctctgcgtggttctttcgatcagggtgtgggaaaatatttccgcttcggactggtgaacaataccaactataacgtcaccaaaggttccaatatcggactgtatggtgtgcttgccatgtctcctatcgctaacccctataatgcggacggcacattgaaacgtaccgtgaaatacaacagtcaggatgagtcatttgtattgaccagaggcgttgtggaagaattggaagacagttggctgagcaagaccgaaggcttcggtacgtacaacaacctgtttgccgaagtgaaatgcccgtgggtggaaggtttgaaataccgtgtcaacctgggtttgaactatcgttctactaaaggtggatcgttcaccggcgaaggcatcaacagcactacggccgacactccgtctaccgcttcgctgaaccactcggaaacaaccaactggactgtggagaacctgctgacttacgaccgtactttcggaaaacaccagctgaacgttgtcggtatgtactctgccgaacagactgtctatacacgttcggacgttgccggacgggatattcctgccgaatatttccaattctacaacatcgggcgtgcggaaggcaccattacggtgaaccccgacaactggaactatcagaagagcggtctgatgtcttggatgggccgtgtgatgtacacttacgacaatcgctatatgttgatggcgactgtacgtgccgacgcttcttcacgtttggcaaagggacaccaatggcacacttatcccgccgtatcggcaggatggaacattcgtcaggaagagtttatggacgaggtggactggatagatatcctgaaactgcgtgtaggttacggacagacctccaaccaggctgttgatccttacaagacctggggacgcttggcaacccgtccttataacttcggtcctaccggctatgtcaccggttactatgtatccgaactgcctaatgccgaattggggtgggaatattcttctacatggaacttcggtctggacttcaccttgctgagaggacgcctgtccggtacatttgagtattacattcagaaaaccaccgacttgctgcaaagcgtaagccttccttccacttcgggagtaagcagctatatggctaatgtgggaaagacggaaaacaaaggttttgaatttaccttgaacggaacgattctggacaaccataacggatggacatgggaggcaagcctcaacctgtctgccaaccgtaacaaactgaccgaactggcttcgggctccaaagatgataaagcgaacaactggtttgtaggacatcccatcgactgtatctacgactatgaaaaagtaggcttatggaacagtgatgatcccgatttccaatacttggacattctggagccaggtggcaatgaaggtatgatcaaagtgaaatataccggtgatcgtgatgccagcggcaagccgactcgcgccattggtcccgaagaccgtcagattatcagcttggaacctaaattccaaggaggtttcagcactcgcgtggcctataaaggcttcgacttgaacgttatcaccgccttccgttgcggaggcaagctgatcagtacgctgcaccacagcaacggttacctgaatatgctgaccggtcgtcgcggacaagtggatgtagactactggacaccggagaacaagggtgccaagtacccgaaaccgggtggtatccagagtggtgacaatccgaaatacggaagcacattgggttattttgactcttcttactggaaagtgcgcaacatcacattgggctacaacttcgagaagcaggcttggctgacccgcatgggcgtacagagcctgcgtgcttacctgtccgtacagaatccgttcatcatctgttctcctttccataaagaaaccggactggatcccgaaaccaactcttacggtaacgagaatgtagctgtgacagaaggtattcagaaacgattcctgacagtaggtactaactcaccgtccacccgtaactatttattcggtattaacttaacattctaaatgaaagcatgactatgaaacctatattttcaaaaataagagttttgggaacagccgcactggctttgttcctgacagcatcctgttcagacattctggacgagcagccgcgcagcagttatgatcctactttctttaagacagaaaagggggtggaaggcggtgtgacctccatgtatgcacacttgcgctatatttacggacaagcttattattataattcctgtctgacgggaaccgatgaggcaacctggggatggagtgccgatggtaacttcaaggatgccgacctgtccggagtaggcaacctgactgccacgacttgccgttccgacgccttgtggggaaccgctttctcgaacatcaacaccgctaacggagtgatagagaacggtgccgaagtaggagtcaatgaatcattggtttccgaagcccgcttcttccgtgcgttcgattatttcctgttggtgcagaccttcggcggagtgcctctggacctaggttccggcgaactgaagttcaatatcactccttcacgtacctccgtgcgcaataccgtgcccgaagtgtacaccaaggccatcttccccgccttgctgaccgctatcgagaacttgcccgctaatcctcgtgtgacgggcggagtgaccaagaccgttgcccgcctgtacttggcaaaggcttatctgacttatgcctggtggctgaagaatccgaataacattcctacttatcccgagtgccagcgtacggaccccgacggacacgatgcggcatggtacttccagcaggcatacgatgtggcggttactgctatcgagaaccccggtcctttcggcttgcaggaaagcttctggatggtgaatgccggacccaatgaccgtaacatggaaatcctgctctatgcagaccatacgcaggaagacgagtattataatggtggcagcctgagctacggtggcggtggtgctcccgataactttgccggatggatgatgaactggaactataccgacgcgcgttcggctgataatcaggctgtcatcaaccgtattgccgagcagtgttatggccgcccttggacccgtatggctcctccgttgggtgtgtttaccaagacgtttgccgacaaggtgaacgactcccgttacgacggtacttttactactgtttatcgcggcaactggtctacagccggacagaactgggaatcggtgaccaatgccaacggaatgaaagtgaaagaacgtgaacctatattctctttcgtattccaggatatggataagatagactatgcaggagaaggttctaaaagcaatctgggagcaggtacgttgcccggtcgtgccgactgggtattgggactggatgcggtaggccgctatgtatatcccggtctttggaaactcggcccgtatcgtacagacaacggctccggagcaggacagcccaatgcgggaagtacccgtccgtataacatcgccaagttctccgaactttatctggttgctgccgaagctgccgtagaaggagctgccacacaagccggcaagtctgcccgtgacctggtgaacgtgcttcgtgcccgtgccggtcgctggacttacagcaatgccgagtacaaggaagtggatcgtgatttcagtgctgaaatgacagccgccactccggcaaccattgacatcaactatattctggatgaacgcagccgcgagttctatggcgaaggttatcgttggttcgacttggttcgtactcagaaatggaacgaatatgctgacagttacgtgatttgtggaggcaagggtgatcacaatccgcagacttacagccgtaccatcgaagcgttccattatctccgtcctatcccacaaggacagttggatggcatggaaatgacagaggaggaaaaagacgcttatcagaatccgggatacagagattgattttttgttttttaagagtacccgccgtttctttctgtttctgatggaagaagcggcggtctttttatggtatggactgctgggtaggttatcatcttcccatagaatatatgttttcagtttgatgagtatgtggcttccttctgataaatttactgtttcacttaggtgggtaagttttatcacttaagtgatggggattctttactaaggtgatgcaatttcatcaccttagtgaaacgataaatttatcaagaggaattagggtattcatcaggctggtaaaggatacttgtacagcttgttgctgcttgtagtttgcgattggtggatatggggtctgtctgttcctgtcggatatgttttgaagtaaggaaagagcttgggaaatatttttccatcggctgaaaggactgatagcagactgaaaggactactgtcagccttatgcattgtgtaatagtgagttatgccggctgaatggactgaagaaaggttcgtgaaataggtatatgtaagagtgttttgtaggaaaagtgtatttgttcataccattgtatccgcaaagtttgcattcggcggaaactgggtctgtacttggtggaaaagagaaccggaaattattttcagttctcttccttattcttatccctcaaatccgcaactacgcgcctaatatgatacagaagcgaaaagaatctgcatcgttagtaaaaagggggcacagtgcatcgaatgtcaccataaagacatataaatgccccttaccccaccatgcgacttgaggcaatacgcaaaatcacgactataagttgtcggtgttatccaaagtcattctggaacacattggcataagcattgttgcatgaatagatattcagcacatacttccttgatgtcctgacccatttggctggcacagagatgaacttaaagacaaacgtcttgatgcggcttgttgctttgagtccgaacctcttcacgtcaagcctcgccatgatgaatttatagaagttgcgtatgagtgccataagcagaagaaacaccgtgttttctcccataaaggattttggaagcctgttccagccgaatccgttattcatatcatcgaagatgcgttccttccctccacggaggttatagaattcgacaatctctttctcggaagactcgtagtcatttgtaaggatgcagcggtaggtgtattctccttcccacaggtcgagttcgccgtctatccgcttctgtctttgaatcacaagacggtatgccttccctttccatttctcgatgagaatggaggccagctcaaactcaatgccgcccaattccactttcttccaacctctgagggcaaagatgtcattgtagagcgaactgcatcggttagcacggatatagaaggtcttgcagtgtttagcaatctcttccactatctcttcagaacacgagccgcaatcagctctgaaacggttgataataagcttgttttgttcaaacctttcaaagaacctcttcagcgtgtccttctggtggaaacggacatttgtgttgccgtcgctgttctcaatgccgacaatcaagttgccaataaccgccacgccagggcgataaccaaggaacttcttgtatgtaggcttcgcatcaaacttctcagcctctatgaactggtggtcgaagtcaacgtcatacccctcgccctctttcagctgccctgtggacaataggcaattgaggagcagtgtattcagcttgtctgccgtgttgaagtcgtaggtcttgccagtgtcggatgtgtaggaaatgttatcctgggtcagttcctttatggctctaagaatcgtgtcggcactgcatgtgcgaagtgtcggatgaagcgaaaggtggtacatcagatgagtggtgacatcctcgatgcatgagccgccacaaaaataaacgctcataagcgaacggatgatttcgctgtattgataaccatacagcctgcatctcataccgagggttgagtcgattacagatgagagtctggagtcaaattgctccattattgaaaatattcctccaaaaggagtgagtttctcggatttaattgctacctttgccatgtctgtcgggtttgatacatattttgatttgcaacactaagataggtgaaaaatctgacatggcaaattcctgagcaactttttgttgctcaggtacttaaaaagttatatttgtaatagtgttgcggaattaaggttatcctgtttcaaatgttgttccatgtatatgctgggaggcattccgtacagatccttgaaagcggtcgagaaattgttgggattggtgaatccggtcaagtccgccacttcggctatggtgtaccgtttcttcgacaacagttctgccgcttgtttcagtcggatgttccggataaaatcccgtgtggtctggttggtcagttctttcagtttacggtgcaagtgcacgcggctgatgcctacctcggtggtaatcatctccacggtaaggttcgggttgctcaggttttcgttgatgacccgcatgattcgttccatcagtttgtcatcgggggactgtacttctattggttgtaccttatccccttgggtctgttgtccggtataggtattgcgtagccgttcacgactgcggatcaggttggcggccgttttcctcaatatctccatatggaaaggtttggtcatgtaggcgtcggctcctgtttccagaccttccagattgtcttcctcccgtgtcttggcggtgagcagtattaccgggatgtggttcaggttcacattttgctttattttgcggcataaggtaagtccgtccatttcgggcatcatgacatcacttattaccaggtccggggttttattgaagatgctttccagtgcctccttgccgttgcagctttccagggtatggtaatcgcttgccagttcacggcagatatagcggcgtatatcttcatcgtcttctaccaccagtactttgtatttcgttttggttcgtgtttttccgttttcttcttcctcggtttcataaggaacaggaaggaccggagccggagtgtggaagagaggagctttgtcggcttccatttcttctttgcgcagatgggcgcatcccagaggcatacggatgataaagctgcatcccggttgtccgtccggattattttctacacggatgtctccgtgatgaagttccaccagtgagcgggtgaggtgcagcccgataccggtacctatgtttgagttgttttggctattccgtatctggtaaaagcgttcgaatatgtgttctgtttctttgggggcgattcctattccgctgtcggtcacggtaatttcggcatactgttgtaatggtttcggcagggtggagtccttaccggtgcgtagccgtatgtccacactgcctccttcgggggtgaatttgaaggcattggacaggatgttcaggataattttgtcgaagttcaccgggtccacccacaactttaagtggtcggcgccctcgtggtggaactgcaaagtaatttgttttttgttcgcttgttctgtaaaggtttcacacaaatcattaatgaatccggtcatttcggtttcacggaaaacgagtgacatctgccctttgtctatcttgcgtatatccatcaattggtttacaagccgaaggattctttcggaattgcgccagatgatgcggtagttcttttgccgttcgtggtctgtatcgtttgtcatcagtttttgcaaaggactgatgatgagcgacatcggagtacgtatctcgtgggagatgttgatgaaaaactgtagcttggcttcgtttatctgttcagcatggatatgttgcatcatttcctgccttatgcggtaacggtgtctcacttgcaggatgatgccatagacggctgctactgccaataaggcatagatcagcatggcccagcccgatgcccaccatgccggtgcgatgtgaatggtgatttcatcggtgtcggattccagcagataatcttcggctttgatccggaaatgataatcgccggggggaaggtcgctgaatgacactcggttgactcctttgggaagcttgacccagggggtgttgtttatggtatatagatacgtgatacgttcggaattatttagttcgcgggtagagaactcgatgctgaaagcgttgtcgttatgtgacaagtggaaatcccgggcctcaaagacggaggtgtttatgatttcttttccgcccgacaacattcctttccttatgggctggtcgtgcagatagaagtcgatgatgcgtacgttccatttttttgcgggattcgtaatctcttgaggattgaaataggtaattccatttgtacctccaaaccagagtatgccgttgtggtcggcaaaagaggcgtttttgctgaattcatttccttgcaggccatcgtctgcatagaaattgctgaacgtgtgggtattcagattaaaacgtgacattccggcattggtgcttatccataagttgtcctgcccgtctcctttgatggcatatacggcgttactggatagtccgtgggcggtggtgtaggtctttagttgccgggtttggggattccattccgccagtccgtcggaactgcctatccagatgttgccttgggggtcttcataaagggagtggatgatgtgtctggacaggatttcttcagtcttgaagtcgtcggtgctcaggcctatacatcttattccgtcatacgttcctacataaaggtggttgtcaccggcatacagaagacagcttatccatttatatttttcggtggcagcattgaatttaggatcatatacagactgtcctgtcttcaagtcataatagaaaagtccggctcccatggtggctatccagagtcgtttgtcctggtcttcaaccagatcatacacgcgttggatacggtttccatgcttgtctgtcagattctgcagatagctgcactgtcctgttttcttatccagtctgcctagtccgttggtataggatccgaaccacagattacgttcagagtcttcatacaggccgaaaacggtggaaggaaccgaaaaggggctgtcatgtggggcataatggactctttgcttcagttctgtggtgatgccgtatatgccgtcgttgtcagtacctatccataatatgccttcgtggtcgcggcagagtgaggtgatacagttggagccgatgatattcttgtttattgatttgtagcctatgtacttgaaactgttgggctgtgcgggaatcatcataacccctttctggtaaatggctatccataggtttcctgcattgtctttcaggacggagtgtactttggaggtaccggagtcgaggtaattattatcaaaagggtaatccgtgatgagctgtttggggatgttgaaaatcttggcgcctttcccgtccgtgcccagacaaagctcgttctggcttatctggcagatggatttgataggcaggttttgttttcctttataaaggataggaatgaactcttctgccggttggttatatttcagcaatcctttgcctatggttgccaggtagatgtctccgtagttgtcttcatagaggtccacaatggtcattcccttctcttgtttcagaaagtgcttgcttttattgtccgcagagaggcggtagataccattctcaccctgtgttacccaaagattgtgttgtctgtcctctatcatgtagtctgtcatttgggtggggataggtaaatccagtttgtgtgcagtcagtttcccctgtgtgatggttatggtacacaagttgtttcccgatacccatatttctccgttcctacactccagaatggacatgatattgctgtcaaaagtctttccgtcttcccattgcgcctgtgtgctgaagctgtcggtggcgggatcgtataactgtattccattataggttcctacgaacaatcgtcccttgctgtcttcatacagggcgcgtacgtagttgtggcagagagagtgctcgttttccggatcatgcttgtagatgacgaatttggctccgtcgtagcggttcagtccgtcttcggtggcgatccagatcataccgttccggtcctgatatatcttgttgatcagactgctggacagttccctgtctgttgtgaagaatttatatgattgtccgtgacataataaagacaggaacatgaatagtgtaagaagcgtatgtttcatcataatataatatctcagattgattcaggcgcacaaaaataattcaaaaaaatatatatagcctaataaaaaagaggtaatttctatacttcccgccataatagggtgagtttgtaacatgggaaaaggactatgtaacatagttccgcccgaaaataaagcggatgtctttatctttgctcttgttgagccgtgaagaacggaaaataaaaacaaccttgtgaatttaataccatgaatatgaaacttgaatgtgatttatccggtatccggaaatgtatgatgagtggcttgtccctgttgcttgccggagtgttgcaggcgcagaatccgattgtgaaactggctatagttaaaaaatagaaagtagaaaaagaaatgaagaagatcatcattattattacctgcttcattggtttgtcgggggcgtttgcacaacaacggggaatgttccataatccggtgattgaggcggatgtacctgacccttccatgataagggtgggaaactattactatctggtaagcaccactatgcatctgatgccgggttgtccggtgatgcgttcaaaagacttggtgcattgggaaacgatcagttatgtgtttcaacggcttactgacttgccccgttatgatttgaaagaaggcacggtatatggtcgcggacaatgggcttccagcctccgctatcatgacggacggttctatgtatggttctcacccaatgatgaaccccatcgtggttatatctataccgccgaagatccggcgggcgaatggacattactttcccgtccgcctcatcatcatgatgcttctttgttttttgatgacgacggcaaagtctatctgttttatggcaccgggcaacttcgtcagctcaagagcgacctgagcgatgtggaaccgggaggtatagaccaaaagatattcgagcgggacgccgacgagcagggacttctggaaggaagtcaggcattcaagcataacggcagatattatgtgatgatgatttccatggactggagcattcccggacggttgcgtcgtgaggtgtgctaccgtgccgaccagataaccggtccgtatgagaaaaaggtgattttagaaactgaatttcaaggatatggtggcgtgggacaaggctgtatagtcgatactcctgacggaaactggtatggctttatttttcaggatagaggcggtatagggcgtgtacccacattgatgccctgccgctgggaagacggttggccgatactgggtgatgcggacggacgtgtgcccgaatgtatggagatgcctgtttacggagaggagtgtaaaggaagtatcatgggaagtgatggtttcgacaccgatcagttgagtttgaactggcagtggaaccacaatccgttggacgattgctggtcactgacggagcgtccgggtttcctgcggttgaggaccggaaaggtggtggacaatctgtttctggctcccaataccttgactcagcgtatgagcggaccgaagtgcagcggtgtggttgctatggatatctcgaagatgaaagaaggagatgttgcgggcttctgcgctttcaatgggttgtccggggtactggctgtggtcatggagaacgggaaaaagcagtgggtgatgtcacatcagtctgtcagtctttcggaccgggaaaaaagggtgactgctgtggaagtactggagaaggaacgcatggattgtgagaaagaggtggtctatcttcgtatggagggcgattttgcagataaaaaagatgaagccactttttattacagttatgacaagaaaacgtggaaacgaataggagaaccttgtaaaatggtttttgattataccaaattctttatgggaagcaagtttgctatttttaattatgctactaaagatttgggaggatatgtggatatagattattttgaatacggtaactaaaaagtgaatagaatgaaactgaaaaaatgtgtggggatattcttgttctccaccttgtgcctgaatgtaggagctatagatcataaagggattacttttgaccagctggctcccgaccgtttcactctgatggaaaacggagtggccaatgaaatattggtggacgagcaggaggatgctggtgtgatgatagcagtaaggaatcttcagaatgactttaaacgggtaagtggccgggctgccgggttatgctatactcccagcgtaaagcgcatgattatggtaggtacgttgaaaagccgctatatcagagaattggtaaaagcgaaaaagatagatgcttcgttgctggagggcaagaatgagaaatacctgatgaccgtggtgtctgctcccttgaacggagtggatgaggcgctcgtcattgcgggaagtgacaaacgcggaacgatttatgggatttatgagctttcggagcagattggtgtttcgccgtggtacgactgggcggatgtgccggtgatgtcccggcagaatctttcgatgacgcgtggaagttatacggcgggagaaccggcggtgaagtatcggggtatctttttgaatgacgaggctccttgcctgaccggatgggtgaagcacacttatggcacgaattatggtgatcatcgtttttatgctcgtgtgttcgaactgattttgcgtctgcgtggtaactttatgtggcctgccatgtggggttggagtttttatgcggatgatccggagaacagcaagaccgctcatgagatggggattataatgggaacctcacaccatgaacctatggcacgcaatcatcaggaatgggtgagaaagcgcagcgaatatggggcatgggactatgcttccaaccagcaagtgattgaccgttttttccgtgaaggtatggagcgtgccgccggtacggaagatttgattaccattggtatgagaggtgacggtgatactccgatgggtggaaaggagggggaagatgacaaatatgtgccgcgtgatgaggaaaacatgtgcctgatggagaagatattccggaaccagcgtcgtattattaaggaagtgacgggaaaagtgccggagaaacgtccgcaggtatgggctatttataaagaggtgcaacgcttttatgatatgggactccgtgtgcctgatgatgtgattatgttgctgagtgatgacaattggggggatgtgcgccgattgccggatgcaaaagaacggaaacgtgccggtggctgggggatgtattatcatgtggactatgtgggggccccccgtaattccaaatggttgaatgtaactcccgtacaaaatatgtgggagcagcttcagttgacttacagttatggggtggataagctttggatattgaatgtgggggatttgaagccgatggagtatcctatcactctttttatgaatatggcttggaatccggaacgctatgcggcaggggatctgttggagcatacacgagtgttctgtgcgcagcagttcggtgaggaacaggcggatgaggccatgcgtattttgaacctgtattgcaagtacaatggacgcgtgactcccgagatgctggataaggatacttatcacttggcttcgggggaatggaggcaggtggctgatgaatatgtgaagctggaggcggaagccttgcggcagtatttgaaactggataccgcttacagagatgcctaccgacaactgattctttttcctgtgcaggcgatggccaatctgtatgaaatgtattatgcacaagccatgaatcacaaattatacaaggagaataatccgcaggcgaatgagtgggccgacaaagtggagcaggcattccggcgtgatgcggaattgtgcagggaatacaacgaagaaatgtcgggaggcaagtggaatgggatgatgacgcagaaacatataggctatacttcgtggaatgatgatttcccggccgaccgtttaccggaagtctaccggatagaacaaccggaaggggctgtaggaggatatttgtttaccggtgacaaaggggtggtttctatggaggcggagcattactttacatcatccgttgcaccgaagaccgcctggacagtcataccgcacatgggacgtacgctgagcggagtggctttgatgccttatacacagtctgcggagggggcttcgctctcttataaaatgaaaataccgcaaaaagtagatacagtaaatgtgtatgtcattgtgaaatccacactgcccttcctcagacgggaaggtcatcgctacacggtaggttttgaaggagcggaggagcagactgtttgtttcaatgcggagttgaacgaacatccggataatgtatatcgtgtactgtatcccacagtggcccgtcgggtagtgaagacccgggtgaagttgagcctgcccgactgtgcggacggaacctatacattggttctaaaaccggtggagcctgccatcgtatttgaaaagatagtggtggattatggcggttatgaggatagttatctgtttatgaacgaatctccttgccggagaaataagctgaatgaacaatgaaaaatatgagattgacagtttgtataggaataatgtgcggatggttggcagcaggaatgttgcatgcaggtacacggccggaccatgttcgcccggtggaagaagatggtagccgcttgtggctaccggtgatacgtccggtggaaggcgcggaggtggaaattacttataaaggaaaagtgtcacccaccatagccattgccattgctgaattgaaaaacgcttggaagggagatcctgtacttttagagaaaaagaaaacagggcgtggggatgggtttgccatcacttcttcagaacatcaggttcgtattctttcatccaccgaaactggattgctttatggcgcttatagtctgctgcgtatgcaggcggcggggcagctcactgtacctctgtcggttactgaacagcctgcgtatgacttgcgtattctgaatcattgggataatccggatggtacggtggagcgtggttacgctggtcgttctttgtggaattgggaggaacttcccggaactttgtcgccacgttatgaggcatacgcccgtgccaatgcttctgtgggtattaatggaacggtactaaataatgtcaatgcctcacctcaagtgctgacaactggtagtttggagaaagtgaaagcattggctgatgtcttccggccttatggcataaaggtctatttatcggttaattttgcatctcctatccggttgggcaagttggatacggcagatccgttggacaaggaagtcattggatggtggaaacaaaaagtaaaagagatctatgcgatgatccccgactttggcggttttttggtgaaggccaattcggaggggcaaccgggaccatgtgattttggacgtactcatgccgagggagcgaatatgctggcggatgcgttgaaaccctacggaggaatcgtgatgtggagggcgtttgtttatagtcctaccgacagtgaccgtgccaagcaggcttatttggagtttatgcctttggatggacagtttcgcgagaatgtaattgtacagataaagaacggaccgattgatttccagcctcgtgaaccttatagtcctttgttcacggctatgaagcagactcccatgatggtggagtttcaaattactcaggagtatttaggcttttccaatcatctggcctatttggctcctttatgggaggagttctttggcgaggtacgtccggacaggttaaaagctgcggcgggtgtggcaaacatcggtacggatgtgaattggtgcggacaccattttgcgcaggccaactggtatgctttcgggcgtttggcatggaatccgttgttgacttcagacaggattgccgatgagtggttgcagcagacatttacttcccagtcggcatttgtctgcccggtcaaggcgatgatgttgcagagccgggaggcggtggtagactatatgatgccattaggactgcatcatcagtttgcatggggccaccactatggtcccgaaccgtggtgcagtgtacccggtgcccgtccggattggctaccctcttattatcatagggcggacaaagagggaatcggtttcgaccgtagcagcaaagggagtaatgccgtttctcagtatcctgattcacttcgtctgatttacaatgacaagacaacttgccctgaagtttatttgctttggttccatcatgtgccctggcagtatcggatgaaaagcggacgtacgctttggggggagttgtgccgtgcatacgatagaggtgtacgacaggtacgtggttttcaggaaatatgggacagtgtggaaccttttgtagatgcacgccggttcagggaagtgcagtcgaaattgaaaatccagatgcgtgacgccgtgtggtggaaagatgcctgtctgctttatttccagactttctcagggatgcctattccggctggcatagaacgtccggtacacgagttggaggacatgaaacgcttccggttggaaatctcgaactatgaatgtcctgagagtgggtttaataaataaaatatggtacttagctttagaagaaacatgaaatataagttagctttagtgatgtcagctttttgtgcgttttccgtatggaccgaagcaaaggtgaaattgcctgccatcctatcggacggtatggtgttgcaacgtgagcggtccgttaaaatatggggaaatgccgataaaggagagagtgtgaccgttgtttttaaaaagaagaaattcagtacggtagccggggaagatggaaagtggttggtggaactgcctcccatgaaggcaggtggcccttttgaaatgatcgtgaatgatattcggttgaaaaatattctagtgggtgatgtctggctttgttccggacagtccaacatggaattgaccgtcggacgggtgactgataaatttgccgaggaaatagcaagggatgagaatccgatgatacggtatgtgaagattcctttaggcaatgatttgcatggacctaaagacgatttgccgggaacggactggatgtcgctgactgaagaaaccgctccttccttttctgctttggcttatttttttgccaaggagatgtatagggaaacccaagtacctgtgggcattgttaactccagttgggggggaagctccgttgaggcttggatgagtgaggaggccttgcagaagtttccgcgtcagttgcacgagcgtgatttgtttaattcggacgagtatcgtgagttgtgcaaccgttcgggacagatgatgaaccgtttttgggatgctgctttgtacaaaggagaccaaggacttcatgatgggatatgctggaatcgtccggaactggatgatacggactggcagacggtagatacgttttccaaagaatggggcaggaagaatggatatccggtgagtggctctcattggttccgtcagaaagtgaatgtatcagcggaacaagccggaaaagatgctgtcctgcgtttgggatgcatggtggatgccgattcggtatttgtaaacggtaccttcgtaggtaacactttctatcagtatccgccacgtatttatcgggtgccggcttctttattgaaacccggtgagaatctggtgactgtccggctgattaattacggaggcgccgccagctttgtacccgataagccctattgtctggtatggaggacagatacagtccatttgtctagccgatggaaatatcaattaggttgtgagatgcctgcacgcactaacagtgtctcttttcagaatattcctaccggtatgtataactccatgatttctcctctgcgtaatctggtctttaccggtgcgttgtggtatcagggagaaacgaatacgggccgtcctaatgaatatgaggaattgctgactgccatgattgccgattggcgtgagaaactggccgataaagaactgcctttcttcattgtacagttggccaatttcatgcagacacatccacacccggtagaaagtaattgggcggctttgcgtgaagcgcaacggcgagtggcgttgaaagtcccgaatgcagctttggcggtggcgattgatttgggcgagtggaacgacattcatccattaaacaaaaaagaactggcaagacgtatctccctgttggtgaaaagaagggtgtatggtgataaaaagagtgtgcacagtgggcctatgtgtacgggtatgactgtcaatcatgaaggaaaggctgttctttctttcgaagccgggactgataaattatgggcggtagatgaattgaagggatttgcgatagccggtgccgatgggcattttcagtgggcggaagcagttgtcgttaatgggaatcaggtggcggtatggcataaagatatccctcatcctgtaacggtacgttatggttgggatgataatccggttcatgcgaatttgaaaaatagaaccggactaccggcttctccttttcagatttcattggaagataaataatttaacagagatccgaaagtggcaaagctttctaataatcttcgatggattttaaaggaatgcttgtttctgtcggattttctatggcaaaaatacctattcctcctttgatgttattgggaaagatgacaggtgtttccaacaggttgctactgtcatggtcggcatatgcattggcggctcgtaaatattgatattcagccggggatatggcataatattgtatgatagcttttccagttatctttttaattttatatagtttattgtctaataggaaactataccaactgtctaaagtcatggtatattggttgttggtaaagtaagcatcattgaatacattataatagttgtttatagtggggatgaaattaatgataggatcagagttgttgggagtgccaggttttccgtccattaatgcagtgtcataatatccgctacattcccattgggtggagatagcagtggagtcttgtaaagttttgcggttagtaaggcggtaagtatatgtttgttttatgttgacccggtaatattgggaatggtttgtggtggaagtttgtaattttattttccactttgttgcttgatatatccaaaggctttccgaagtctctgatagagaatgattagattcaatggtgtccgctttgataatttcaatgggctcatatactgttgcttctgcattcgctttatattttccgtctttggtttctacttcgatacgtacttgatcaccggttttaaaacggctgcttatctgataaaaataattttgatagtctaacggtgaatcattgttaggacgataggtacattccgaaattgtttccgataatacattattgatataaaggtgaataattccattttttactacttggggttcgtgatagccggataaagctaaaaagatagcattgttcgttttgtttgcgtttatcagagcgttgacgatgagcttttgagattcatcattaggcaatatttctatatcattggtacaggcggccaataaatgaacaaatgaaaggagtaaaagtgcttttttcattattgcttaaaatttataagtatatgagaatgaaggtaagaagggaaggagagtgactttttgtatcacaggaatcttttttccttccgattgctcatccgtgtaataatctataaatacatgattgggattcaaagagttataggcattcataatactgacgttccaaatccgttctccatgttttgtctttttgtgaaagttgaatcctagattcaactgatgactggcgggcagacggtagttatttcgagaagagctatattcaatgggaaaaacaaccccgttgcctgtatttcccatatgtccccatccatagcttccttcggggagaatgatggttgctttctctttgggcagggtggcagtatttcctgaagcgtaaatccaagaagcgctcatgtatacttttttgttgaggcgcctgtttatcgtgatgttcacggagtggcgtctgtcgtatttatagggaaaacgtttccctccatttacatttcctttactgaatatacggtcggctttagccaaagtataatttatccatccggtagtacgtccggttttcttttccagcatgaattctatgccgaaattgcgtcctttgcccatttctactttctcttcccaatgaatggaattaccgactagagtattaccatctttgtattccaatacgtttttcgtcattttgctatagccttctacagaaaactcccatccttgaatacctgtatagtaacccccgatagaaaattggcatgcttgcatcgggcggatcttctgtgtgaccggtacccatagatcagtggggagagagagattggatgaagaaagtaaatgtacatattgtgtcatgtgggtataggccgccttgaaagtaaggttgggactggttttgaaactaacggtaatgcgaggttccaaggaggcataagtgtgcttttgtacttggaagagtgagaaatgtgcgcctatatttgttttccattgttcgttccatttgaaatcatcttctacataaagggaaatttcgtgtgagtgtgtcgcttcatttcctccgatggtgtatgttttatcaggttgttcttgttcattcggagagtgcacaaatgtatgttgggtttcggggcggaacgtatggtagagatagtttcctccgaatttgatgaaatgggagggggatggatgaaagtcgaagtcagatgttaatccccaatcttctataccggaataatattggctgtcaaggtgtttgttggcggacgtgaaattgttttttatattgaatcggaaacggttataggatagggtgatgttatggaacagacgattactgactatgtggttccaacgtaatgcccctaatgtacttccccaagccatgacttgtctctctcttgtgtctgtctccttttcttcttcaaagtaataagaagaagtatttgtaaagctggcatgatctttgccatgataaaaggagaaaaacaggcggtcacggtcactgaaccgatgatttagttttgtgttgatatcatataagtagtaacctcctttcgtatctttatccatgaaaggcttgataattaaatcggcataactgcgtctggcagaaataataaatgatgtccggtctttccatagaggaccctcaaagtgcattcgggaagtcagcagcccgatggtcagactgccgtgataattcctcatatctccatcgttagtgcgtacatcaatgacggaggacagtcttcctccgtaacgggcaggaaaactgcttttatacaaatcgactttcttgaccgattctggggtaaagatggagagaatacctagtgtatggtccacattatataagggtacaccgtctagcagataaagattctgatcgggacttcctccacgtacatacaggccactggtaccggttatacctccttgtataccgggcagaagctggattgattttaatacatctgcctcactcagtaaagcaggggtatttttaatatgtgtcaaaggtatattgtttgctcccatacggctactttgaaagcctgtttccattttatcagaaaggacaacgatttcttccaatgtattatcgtttttaagttggacagtcagcagcgtatctttacataaatacaatgctatttgttttgaaccgtaacctatataggaaaaattcagttcagtgtttccttcgggcagtgtgatactgaagaatccgaatggatttgtgattgttccttgtttattttgctggtcatagatattggcacctatcagtgtttctttcgatatttcgtccaatacataaccgtttagtgtaaaatgttgttttataggaagtgacgttgtttttttcaatatgatatggtgtttggtaatctcgaaactgatgtcttgtttaatgaaagctgtttgtagaatagttgttaatggggtttctttcagatcgagagttatgggatgtttgagtacaacttcttcgccataaataaaagaatactctgacagttgttctattttagctgtaaactcctttaaactagcctgtttcagataaatattaaaaggcatatccggagtttgtgctgatatgaatgaatgggaaaagactagtaacagcattaagtaaaaaaaagtgatactgtgtttcttataaagtgaagaaatcatttgttttttagttttcttgctttagttcaataagattggattggggcatgtgataagtaaaacctacgatgggagccaacatttctagaatttcttccaacgtttcgttttgcttgaaacgtgcatttaatttataattacgtaactgttcgctttttatctgtatggtgacattaaaatgatgggatagttgacgagcgatttctcccatagatatgtcattaaaagaaagaataccttcacgccaacttatttcgttctgtgcatttgcattaatgtgcatagacaatattccagtcgatttacgataaatggctgtttcattgggctttaatatcatttgtttaccgttggcattgttactgacggatacactaccttccagcagggttgtttctactaaagaatcggcggcataggcattgacattaaaatgcgtgcctaataccctgatggtaactccgtttgctttgacacgaaatggttttttaggatttttactgacttcaaaataagcttctccattcagctttacgattcgttccttgttgaaagtttccggatagctcaattgggaatgtcggtttagggttactttagagccatccggtaattggatgcattgagtttgtatattggtggaaacaatcagtgtacgtaccggacgttggtaaaaataaaacatccaaccgaaacctataagcaggacgaaaccggcagccacagcaactgtataccgaatggaaagtattttgtgcttgcggtatgccggttgaagacgttgttgcaatatattataacttttctccgccgagaattttccctgcggtgaatgagtggaagaagataataattccaaccattcgtccagttctttgtctgatttcggtgaattcatgttattttatttgctggacaaagatactacttcttttgcagacggatagaaatttcagaaatttttgcgtcttttccgtcaggagtacagatcaaccgtatgatacgttgtacgctttttatttgtttaggataaagaatgatatctatttttactgatttctttcctttcaagatgaccggatgggcattttgaatgtggaagctattgttacttgtagaactgctaatggtcagtttacggtctgtgtcttgtttttcggcagctattatttttaaagtaagggtttcttcctcgttctttgtatcataggtgtgtgatatgaattgtttttcaaagcctatatactctttgggatagttgtcgttgttactacatgcacttataagcagggcataaaaaaatggtaatactaaacgtgtatttgttctcatgtctttttagtttattagtttctattgataaagacaggagaatctggaaaactccctatcgtctatttctaaaataattgttaattttttctttgagtcgggttacagctttttgtaactgggcatctactgttttagggcttatattaagttcttcggcaacggaagcataactttgtttttcttcgcggactttaataaagattgttcggcaacgttcaggtaattcattcagtgagttctcataaatgttaaataactcttcattcatcatttgttcttcaggagaaaggttggaagaagatatttccggcatattttccagaggcgaggcttccctcctttgttctttttccaaatagttcagagcggcatttcttattaatatatagctgtacttattaaaatcatcgggaataagctgactttttcgatgattccaaagcgtggtaaaaacatctaaaattacttcttgagcccattcatcccgttgaaggtaataaaaggcgatacgaaagaaacggtcataatacatatcgtataaagaccggaaagcctgttgggaatcatgcttctgtatttctttgagtagttcagttgcctccattgccgtgttgggcatgtttgttaatgttataatcggatgcaaagctactaaaatgtaaatagatgtgctattcattttagaacttttagttttgatttattgtatgagaggaactgaagccttcttcttagtatctgtcttggcaattttcttctttcaatttatattctacttggttggcaatactgaatatacctattcctccttttatattattgggaataaggggaactgcataaataaaattttcggcatcaaaatctaatgcagaggacatggcatacaaatatctatgttcactttctgaaatactgtaaaaccggatactgatatatcgctctgctttctgagaatctatatgtatatagttgatgtcttcttttaaatctatcgtcatgttatattccctgtttttaaaataacagcttttaaaaaggccaaaataattgttccatttctgaataagctcgaatccttcatctatagcatgtccgggtttgccgtctgtcaaggcggtgtcataaatataattatagttataagtcgtgtcaatactgagagtgtccctgccgtcatgccatttatgagaataaaaaatctgttttacttcaagacgatagtatgtattctctgcctctatatcgggttgttttaattgaatgttaagccgaagataattgtcatatacaggcttgcctcctacccagctgttgtaatctcttaaacttatataggttgtatctacatttataatctgtaagggtgcgctgatgcgtgtttccgcttttgctttatatttaccattttctgaagaagcctctattttcactctatctcctgtttggaatatgctttttactgggtagtaattatcttccgcagtgattgtttctgacagttttccgttgatatacaggtgtatgataccatcggtgacaggagtggtagctgtccatcctgtgtaatgcagataaatccggttatcgttattttcagtttgcatcatggcatttacgatcagttttttaggttcatcatcgggtaaataaccaatggtattggtacatgcgcttaaaataacaaatacacaaagaaataaaaagtattttttcattggattttaaaatttataagtgtatgaaaatgaaggaatacatggcaagattgtcatttttttcaatataggctttcctgtttgtgcttccctgctgatatagacaaagttggggttcatggcattgtaggcatttaggatactgatattccatatccgttctccgtgccgggtctgtttatggaagttgaatcctatattcaattggtggcttgcaggcaatctgtagttatttcgtgaactagaatgatccatatctcctttgttcaaattatccataatccaggaaggtggtacattggtaggtggtagttctgtatgtgtcttctctgtaggaagtgttgccatgcaacctgatgcataagtccatgacatattgaagtcgatccgtcgtgtcaattgataatttagagtgagattcaaggtatgtcggcggtcatattggtaagggaaatgtttaccattattgatcccgtccgtactgaattgccggtcggatttggatagggtgtaattaatccatccagtaaggagccctgcagttttttgtgccataaactccactccgaatgaacgtcctttgcccatttctactttgtcttcccagttatgggaagaacctagaaaactttctccgtctttatattctaatacattatacatatctttatagtatccttctatggaaaattcccaattcttgataccggtatagtatactcctacagcatattgaaaagatttcatggggcggatgtggcgtgtgacgggcacccaaaggtcggaaggcatggccagtgatgcagtagataataattgggtacactggctcatctgtgaaaaagaactttttaagatgatatttgaggtcgcttggaaacttatggaaagacggggttgcaaagaaagataagtctgtttttgtacattaaaaaatgaaaagtgcaatccggcatttattttccaatgttcgttcagaataagatcatcttcggcatacaaggaaaagtcatgagcatggatatgagaattgttcaaactataattgtcgttagtttgtggatatccattgtcggaattgtgttgatttacggtctgcacttccggagcgaactgatgatatatgtatttcgctccaaatttgatgttgtgtgccggtaacggatgataatcaaaatccgtactaatgctaagatcactgatgccggagtgaaacagattgttggaaccattgatgattgtggaaccatcaggttgttgtatgctggaagtttcctcttgtctgatatcaaaaacataacgattgtatgccagcgtagtattactgaatagttggggtgtgaaaacatgattccagcgtgtgttcagtaatatgtttccccaattgtgagtttgcttgaacttatcttcatctttgtatttatagtagacgtggtcttttcctttatagaaagagatgaaaaggcgatcttgttcactaaagcgatgatttagcttggcgttgatgtcatacaaactataaccgccccgttcgtcctttggcataactagtgggaggaaacagtcaatataactgcgtcgtgctgagataatgaaggaagtatgatctttccatataggtccttcaaattgcagatgtgaagtgagaagaccgatagtcaagcttccatgatagtgctgcatgtttccgtcattggtacggacatcgacaatagatgaaagacgtccgccgaatcgtgccggaaagctacttttgtataaatcgacttttttcacggcttccggagtgaagaccgataacaggcccagtgtatgatctacattatataaaggtacaccgtctaataaataaagattttggtccggacctcctccgcgtacatataacccactggttccgttcattccgttttgtacaccgggcagtagttggatggattttaatacgtctgcctcactcatcaatgccggtgtgttttttatgtggggaataggaatactgcttgctcccatacgactgctttgaatacccgtttcgggtttgtcggacaagataatgacctcgttcagttggttgtcattgcggagttggatggtcagcatagtatctttccataggtgcaaagacacttgttttactgcatagcctatatatgaaaagtttagtttagtgcctccctcaggcaatgtgatgctaaagtatccgaaaggattggtagtagtacccactccgtttttctgatcataaatattggcacctatcaatgtttctttcgatatactgtccaatacatacccgttcagggtaaaagatttcttgctggattgtagagcgtatttttttaatataatgtgatttttgtttattttgaaactgatattctgtccagcaaaagctttctgtaaaatcaggcttaatggagcttttcttagactgagggttataggatgtttaaggatgatttcctctccataaataaaagagtagccggaggctttttctatttcaaatatgaattctttcagattcgctttttttaagtgaatgctgaaagaaagatctgctttttgggcctgtatgaatgtagtggaaatcattagtaacagtatcaagaaaattcccttgatactgtattgattgcaagttgaagaaatcatttagtttttagttttcttttattattcaataatttatatgcctttattcagagtctgttatcctctttgtaatatttggagaaagagtttccaaaatttgatttgtgttatggttgcattcggaactcttttgttccgttttcctgtgttcttcagaatcgttttcgctattgtaagcataagcttccattaatgcgtagaagaatggaagaactatgcgcgtacttgttttcatatctttttagtttattggtttatataagtaaagacagggaaacttgaaaatctccctatcgtattttataaaattattcatttatttttgggggatgcttttaaaatagcatatgtgaatattcgctgaagtattagttactccacccaaagcatgtcgctcatgatcccgtctgatataaaaacgcctttacgggtcagtttcagcgtatcgttttttatttccagtgttccttgttgtaaatatggagtggccatacgtaggcagtatttgtacagttcttctccgtattgtttcccgagtttgggcagtggcattccccattgtgtacgtatgtgggtaatgacaaaatcattgtaacgggtatataggtcaagttcttctacttcgaatgtgggatttccgcttgagatcccctctatatatttatctagtgaagctacattccattggcgtgaaatgccattataggaatgtgcggaaggaccgcaacctaaatattgcttttctgtccagtaactggaattgtgccgggaatgaagacctggcaaacagaaattggatatttcataatgctcgtatccggcagtagtgagctcgtcgattagtgtaccgaacagggaaacgcttaagtcctcgtctgcttcttctactttatgttgttcgcggagtttccacaggggagttccttcctcataaataagatgataagcggaaatatgttccgggtgtaaggaaagggcttgttttaaatcttttttccatgaggtgagcgtttcgccgggcagcccatacatcaggtcaatactgatattttggaaacctgccgtgcggcagccttggaaggcacgaatggcttggtcggcggtatgtcgtcgttggagttgttttaaagtcgtttcctggaaagtttgaattcccatacttatccggttgaaaggaaaggtgcgtagcatagagatatactccgatgttaagtcatcgggattagcttctaaagtaatttcggcattgggggttactttatacaccttataaatatgggagaaaatagcttcgaaatcctctttagccaattgtgagggagtaccgccacctagataaatcgtttctatgggttctcctttcagatagtttttccggtcagttagttcgtggcacaatgcacggatgtatgctgttttctgttctttacgagtagtagagaaaaaatcacagtaaatgcaacgctttttgcagaagggtatatgtaggtagatgcctgccatgataacttattttgtggcaaagttacaaaaaaataatgctaatatagaatatctgtcgtaaaacatagtttagtaacactatcctttaagttgttttttttctctttattttctaatttgcgctccacatttttaggagatatgaaacacatatccgtttgttaataattaaaccttagatatcatgaaagtatatcagactaacgaaattaaaaacattgcacttcttggcaatgatggctcaggtaaaaccaccctcacagagtctttgctctttgagagtggtattataaaacgtcgtggcagaattactgccaaaaacacggttagtgattattttccggtagagcaagaatatggttattcagtgttctctaccgtttatcatgtagagtggaatggaaaaaaactaaatataattgactgtccgggcagtgatgacttcgtaggggctgccataaccgcgcttaatgtaaccgatactgctattttgctactgaatggacaatacggtcccgaagtaggcactcagaaccacttccgttatacagaaaaactaggcaaaccagttatctttttggttaatcagcttgataacgagaaatgtgactatgacaatgtactcgaacagttgcgtagtatttatggctctaaggtagttcccgtgcaatatcctcttgaaacgggacctaattttcatgaactcattgacgtgctgttgatgaagaaatattcatggggaccagaaggaggtgctcctacaattgaagaaattcctgattctgagagagaaaaggcattggagatgcataaagctttggtagaggctgctgctgaaaatgatgagacattgatggaaaaattctttgaatcggaatcattgactgaagatgaaatgcgtgaaggcatccgtaagggattggctgcacgtggtatgttccctgttttctgtgtatgtgcaggtaaagatatgggtgtccgtcgtctgatggaatttttaggtaatgttgttccattcgtatcagatatgcctgtagttcataatactcgtggtgtgcctgtgcctcccgatgctaatggacctacttctctttatttcttcaagactgccgttgaaccccatatcggtggtgtgcagtattttaaagtgatgagtggaaaggtacacgaaggtgatgatttaactaatgctgatcgtggctctaaagagcgtatggcacagctttttgtttgtgccggagctaatcgtattccggtgccggagctggtagccggagatattggttgtactgtgaaattgaaagatgtaaagactggaaataccttgaacggcaaagactgtgaaaaccggtttaatttcattaaatatcctaatgctaaatactcgcgcgccatcaagcctgtaaatgaggctgatgtagagaagatgatggttatattgaaccgtatgcgtgaggaagatcctacttgggaggtagagcaatccaaagaattgaaacagactattgtgcatggacaaggtgagttccatctccgtaccttgaagtggcgtttggagaataacgaaaaattgcagattaagtttgaggagcctaagattccttatcgtgaaacaatcactaaagcagctcgtgccgattatcgtcacaagaaacaatcaggtggtgcagggcaatttggtgaggttcatctcattgttgaaccttattatgaaggaatgcctgtacccgaaacgtataagtttaacggtcaggaattcaagataaatgtgaaggggactgaggaaatacctttggaatggggtggtaaattagtctttattaacagtattgtggggggatctattgatgctcgttttatgcctgctatcttgaaagggattatgagccggatggagcagggtccgttgactggttcatatgcgcgtgatgtacgagtgattgtttatgatggtaagatgcatccggtagactcaaatgaaatctcctttatgcttgcaggacgtaatgcattcagtgaggcatttaagaatgctgggcctaagattctagagccaatttatgatgtggaagttttcgttcctagcgacaaaatgggtgatgtaatgagtgatttgcaaggtcgtcgtggtatgattatgggtatgagcagtgaaagtggatatgaaaaactggttgcgaaagtacctctgaaagaaatgtcttcttattccacttctttgagttccttgacaggtgggcgcgcttcgtttattatgaagtttgccagctatgaattggttccgacggatgtacaagaaaaattaatgaaggaatttgaagctaaagaaaataaagatgattgataaagtgtaagatttcatacttagaggagacgtatttcgttaaaaatacgtctctttttatttaagataacttaaacttttaggtttgttatttggttttgaacttaattttttattatttttgcaaaccaactggcgtaaattttgttataataatcagaatcttagcttaaatgactttttcggttaattatagagaatagccgtttaaatttggttaatctattatgtaatgagatttagcgcttttaattttgctgacatgaaaaagtctactatttgggtattaggtattgtaatgggactatcatttcttagtttattgtatttgcaggtaagctatattgaagaaatggtgaaaatgcgcaaaggacaatttgatgagtctgttcagcgcagtttagtccaagcgtgtcgaaatattgagttggtggaaactaaaaagtaccttgaggatgatgcgattgctacagaaaaagcagcacagttatccagggagcagtccgaagaaaaaaagggggagggaagtggtaatgtggtagcgcatacacatgagtactccataacttccgatggattgaacggttactctacttttgaattgaagatgaggttcagtgcgaatcgtccttctaatattcctaaagcgattatttcgactggtaagaatattcctcagacttcaagagccttgcaggaaataattaaagacagatatgtgtaccaacgtgcattgttggacgaagtggtctataacattttgtatacagctagtgacaaacccttgaacaaaagaatcaactttaaacagttggacttgtttttaaagacagaattgctgaataatggcattgatattccttaccattttacggtgacagaccgtgacgggacggaagtttaccattgccctgattataccaaagagggtagtgagaatacatatccgcaggttttatttaaaaatgatcctccggctcgtatggcaacagtaaatattcacttccctacattgaacagttacatattcagttctgttaaatttatgatcccgtcactgatcttcacatttgtattgcttgtgacgttcatttttactatctatatcatcttccgtcagaagaagttgaccgagataaagaatgatttcataaataatatgacacatgaattcaagacacctatctctaccatatcgttggcagctcagatgttgaaagatccggcagtgggaaaatctcctgctatgttccagcatatatccggagtgataaatgatgaaaccaagcgtttgcgttttcaagtggaaaaggtgttgcagatgtctatgttcgaaaagcaaaaagcgacgctgaagatgaaagaggtgaatgcaaatgatttgatagccggtgttgtcaatactttcacgttgaaggtagagaaatacaatggtaaaatcacttcgaatttggatgcggtaaatccggatatatttgtagacgagatgcattttacaaatgttatttttaatttgctggacaatgcagtgaaatataaaaaacaggaaggcgaattgttgttgaatatacgtacttggaatgaatcgggtaagctttatatctctatccaggataatggaataggtattaagaaagaaaacctgaagaagatattcgataaattctatcgtgtgcatactggtaacctgcacgatgtgaaaggctttggtttgggactggcttatgtgaaaaaaataattcaagatcacaaagggactatacgtgccgagagtgaattgaatgtaggaactaaatttataattgtattacctttattaaaaaatgaataatatggacgagaaattgcgtatcttgttatgcgaagatgatgagaatcttggcatgctattgagagaatatttgcaggcaaaaggctactcggccgaactttgcccggatggtgaggctggctacaaggctttccttaagaacaaatacgacttatgtgtattggatgtgatgatgccgaagaaagacgggtttactttagcacaggaaattcgccaggctaatgctgaaattcctattatcttcttgactgctaaaactttgaaagaggatatattggaaggcttcaagattggtgcggatgattatattactaaaccgttcagtatggaagagttgactttccgtatcgaggctattttgcgtcgtgtacgtggtaagagaaacaaggaaagcaatatctacaagattggtcgttttacttttgatactcagaaacaaattctggctatcgatggaaaacagactaaactgactacgaaagaatccgaattattgggcttgctttgtgctcatgctaatgagattctgcagcgtgatttcgcattgaaaactatttggattgatgataattatttcaatgcacgaagcatggatgtgtatattactaagttgcgtaaacatttgaaagaagatgattctatcgagattatcaatatccacgggaaggggtataaactgattactcccgaagtagaataagaggatatctgatatttagtagtaacatttagttgcaagtagatgaaaaaatcagctcgttcttgagaacgagctgattttttgtgtagaaattattgtttaaagtaggttgtaaaattcatgttatatttccgttaaaagcttcatgtctttataaatagcttattgtcagatgattaaggtgaagaattcgtagctggaaagcttcagctgtaaaaaatccgtaagcaagacaggggagtatgatccgtagtcagaaagagttagtattatgactgtttatgtttgtgtcggttgaaagattactaatgttacagttgaaagatgtataatctaacaggcattacatatataaagattagaagaaaaggacttttcttttcggcaatctggaataaagtgagtaaagtcgataaaataaaaaagtccggagttctacccggacttttttatttttgttctcttatactttaatcaacaatgcgtttgtttaatacaatataaacgattaaacctataacgataagggcggcacttccacctaaaacaccgttgtcgttaattgctgcacttccggtgaagaaaacaccgactaaaatagcggcgccgatgatcatcagtatcagacctaaattcttaagtaagcttttcatgtgtgtattttattaatagattatatttattcttgtgtacaaattaaagcataattctcttatcatggaaattattttaggaaaaaaagatgaaaaccttgaaaaactttagtctttgatgttggtgaatacctttcttaatacatcttggctgactttcagttcttccaatgttaatccttgtagtgcttctttcaatgtcttgtttgcgatgaaacgtgctttaccttctaattctctgccggttttggtcaaatgaattaaattggtgcgtcgatctcttttgtcggcgatgcgtaccaccagatgctggcgttccatattgtctattaagcgggtcatgctgggtttgtctttaaaagtggcattacatagttcttgctgtgtgacaccatctttttcccatagaaaaagaaggactgtccactgttcaggggtaatttctacaccattttggcgaaaattccggcttagtttccggttgatggctgcagatactttgccatttaatatggcaaatattaattggatatcaaaactaaattgttctatcatggaattattgtttaaacaactttgcaaatatacaattcttggcggatataacttatcttttacagataaaaaatataaaaaggaagattaattgtaaaatgaaactatattttttgaagaaaattgtgataactctttgtagattaagataaaatatctacttttgcactcgcatttgaaatttaatttaataatttaataaacgtagtatgaatcaatacgaaaccgttttcattttaactcccgttttatctgacgttcagatgaaggaagcggtagagaaattcaaaggtattctgactgcagaaggtgcagagattatcaatgaggaaaactggggcttgaaaaagctggcttaccccatccaaaaaaagtcaactggtttctatcagttgatagagttcaaagcagaaccgcaggttattaaaaaattggaaattaacttccgtcgtgacgaacgtgttatccgtttcttaacttttaagatggataaatacgctgctgaatatgctgctaagagaagaaatgttaaatcaactaaaaaggaggattaatcatggcacagcaacaatcagaaatcagatatttaactccgccctcagtagacgttaagaagaaaaaatactgccgtttcaaaaagagtggtattaagtacattgattacaaagatcctgaattcttgaagaaattcttgaacgaacagggtaagatccttcctcgccgtattacaggtacttctctgaagttccaacgtcgtatcgcgcaggctgttaaaagagcacgtcacttggcgttacttccatttgtaactgacatgatgaaataataaggaggaataagtatggaaataattttgaaagaagacgtagtgaacttaggctacaaaaatgatattgtaactgtgaagtctggttacggtcgtaactatcttattccgactggtaaggcagtgattgcttcaccttcagctaagaaaatgttggcagaagagctgaaacaacgcgctcacaaattggaaaagattaagaaagatgctgaagctatggcagaacagttgaaggatgtaaccttgactattgctactaaagtgagtgccacaggtactatcttcggctctgttagcaacattcaaattgctgaagaattggaaaaattgggtcataaggttgacagaaagattatcgttgtgaaagatgcagtgaaagagattggttcttacaaagctatcgttaaacttcacaaggaagtttctgtagaaatcccgttcgaagtagttgctgaataaaatctgtaaatactttaaagtataatgatgctgaaaaagcccggttcgtaagagccgggctttttctttttaatatgtttgatttgttaattcaatcgtttcttttataattttttgaggagtggtaaaaggattttcgtcaaaagtgtttggcatagtgaggatcagttgtttgatatcatattcttgtatcctagctacccatactttataaatattgttataatttttatgaatattataaatggttaggtgagagaagtagctggttatataatcttgtttgtatttataatagtctttgttgtcctcagttatttttctacatccttttataggtttgtaaaagttttgaaatgaactctttgtcaggtatctgttgcatcaatgctgaacttttcagtacttctagcacatcttccgaatactcacaatcttttacgcaaaaggagaattggcattgttttttaaaatagaagctttagttgtttgaagtgaatcctgttttacgttagcaatcggaagaaactgatttcatttaaatacgcgacttcggcctgattgatacttttcaaattttcttctaattccatttttatcatttgcatactttcttttatctgcttttcttgtgaggaattgcttatgaaatcagttcggcaagagtgataaatactccagtgataacaatagataattcacggaaatagtttcccaacttccagttttgaagtgtttcttttagatttgtctttttcatatcctgtttttgtttgtggtttgagaaacaaaagtagataatttgtattgcaaaacgatggaatattggcagaaaagggaggagtaaagacataaaaaaagtctgttgcgctttcgcacggcagactttcaattctctctagagttcgtactgaattattcagctttagtagagtcacagcaagcagctgtagagtcacaagcagctgaatctgctacaacttcttctacaacagcagcttcttctactactgcaactgaatcagttgcttctgtgttgttgttagcagctttgtttccgcaagatgcgaaagatacagctgcgaaggctacgaacaaaaatactaattttttcattttctttgctttttaaatctgtaatactaatgttgctttcttaaaacgatgcaaaggtatacactttttcaatacgttgtaccaaaaagaacaactttttttctagttttttatgttatacaacctattttgctgattagtagcatgttttataacatatttattcttcagtaatgctgttatataagaatcgtttgatgctttttttgggagttttttcgaactctgtaggataaagttgtattttactcacttgttcataatttcctaccagtttattcagattcttcaagttttcatccattactgtttttaggttttcgggggtattgagtcccagactgtccagactttcataatcaggatatactaaagctaccagtttcttgttgcgctctatgattaaactttctagaacgaatggcatattatttagtttggattctatctcttcaggaaaaatattctgtccattagaactcagaagcatggttttactacggcctcttatataaatgaatccgttagcatctattgtacctaaatcgcctgttttcaaccaaccatcttcggtaaatacctcacgggtagcttcttcattcttataataacctttcattacgttttcaccacatacctgtatttctccagtaatgttatagggatcatccgagtcgatacggactttcatgatatccagtatctttccggcagaaccaggtataaattcattccatggagcataactgatcagtggggcacattcggtcattccgtaaccgatggtgaacggaaattttattttgtagaaaaaatcggtgacttccgggttcatggcagctccaccgataatgacttctttaaaacgtccgcctaatgcgtcaatcagttttttgcgaatttgtgcataaatctggttgtctagtaaaggtatgttaagcgcccatttcatgctgcgtttgttaatgagcggctgaattacattcttataaattttttctataaccaatggtactgtaataataaggttgggtcttacctcctcaaaagctttcatcaatattttgggagaaggtgtctttcctaataaggtgacatgtgtaccgacagcagtagcggttagaaaatcaaaagcacatccgtatgcatgggccaagggaaggaaggaaagtactttttctcctttctttaaaagttctgtacggataccaaaggtaacgtttcctgccagattattgcccgtaatcattactcctttactgaatccggtagttcctgaagtataattcagtaacatgaccttctcgttggagagttctgtgtaattgatattttccttatagaagcctttggggaagttctttctcatagctgcatcaatattcttcatgaatttttggacggtttcaccgtcacgttgatgcaggcatctgaaatccgttagagaaaatacagcgcgtaatccacttaatgcctcttcttccaaattttcccaaatattatcgctggtaaacagaaatgtggattcagaatgatttacaatatgatggacatcatttggcttgaagtcttgtaaaataggaactacaatagctccgtatgtaacagttgccaaataagcgatacaccaacgggaggtattcttacctataatagatattttatcgccacggcgcaggctgcaatattggaataataagtgtatcttagctatttcttccgctacttgtccgtatgtaaacgtggtatcttcaccataatctgtgtaacagggcagatcccagttttctttgaagctattctcatatagcttgataaagttttcttttatcattgcacaatttttgatgtaatgtgcaaaaataagcataattattggtattctaaagaatttaagcagaataatatgtacctttgctcgctaattagataaaaaggtatgattgatacgataattttccaggataaaacggctgtttattatacattaggctgcaaattaaacttttcagaaacttcaaccatcggcaaaacactgaaagaagcaggtatacgtacagcacgtaagggtgagaaagctgatatttgtgttattaatacttgctctgtgaccgaggttgcggataagaaatgccgtcaagccattcatcgtttggttaaacagcatccgggtgcctatgtagtagtgacgggatgctatgcccagttaaaacctgaccaggtggctaatatagaaggtgtggatgttgttttgggagctgaacaaaaaggagagttgatgaattatctcggaaatttggaaaagcatcctcaaggtgaggcgattacgacagctgcaaaagacatacgtagtttttcaccttcgtgttctagaggtgaccgtactcgttattttctgaaagtgcaggatggttgcgattatttctgctcttattgtacaattccgtttgctcgtgggcgtagccgtaacggacgtattgaagagattgtggaacaggcacggcaggctgctgctgagggaggaaaagaaattgttattactggggtgaatattggagacttcggaaagacaaccggtgaaagtttctttgatctggtaaaggctttagatcaggtggcagggattgaacgttatcgtatctcgtctattgaacccaacttgttaacggatgaaataatagaatatgtgtcacgttcacgtgcattcatgccgcattttcatattcctttgcagtcgggcagcgatgatgtgctgaaattgatgagacgtcgatatgataccgcattgtttgcttccaagatacgcaaaattagggagatcatgccgaatgcgtttattggcgtggatgtaattgtgggaacacgtggtgaaacagaggaatattttgaagatgcttatcattttattgaagggcttgatgtgacgcagttacatgttttcacttattcggagcgtcccggtacgcaggccttgaaaatagagtatgtagtgagtcctgaggagaaacatcgccgtagtcagagattgttggttttatctgatgagaagacaaaggcgttctatacctctcatataggaaaagaagcttgggtattaatggaaaaatctaaggttggcactcctatgcatggatttactgataattatatccgggtggagatggaccacgatgatcaattggataatcagttgattcgtgtaagaatgggaggctttaatgaagagggtacagcgttgaagggtgttttagtctgaaaagaaatgaaaagggtgtctgttgtcatattgaattggaatggggtagatatgctccgtaagtttataccttctgttatagataattcagtaggagaggggattgaaatttgtgtggctgataatgcgtcctctgatgggtctcttgaaatgcttcgtactgaatttcctgtagtccgtttgattgagttggatcgaaattatggctttgccgaaggatataaccgggctttggcgcaagttgatgcagaatatgtagttttactgaatagcgatgtggaggttacttcgcattggttggaacctttgttggattatatggatacccattccggaacagttgcctgtcaacctaaactgttaagttggcataataaggaatatttcgaatatgccggagcgtcggggggatttattgatcgatatggatatcctttttgcagagggcgtatttttgatgttgttgaaaaggactgcggacagtatgatacggtaacggaggtgatgtgggtaacgggggccgctctttttatccggttggctgattatcgtgaagttggagggttggatgatcatttttttgctcacatggaagaaattgacttgtgttggcgtttgcgcagccggggaaaaaagcttgtctgtattccgcaaagtgtggtatatcacgtaggaggggctacgttgaaaaaagaaaatccgagaaagacttttctgaatttcagaaataatctgttgatgctttataagaatttgccggataaggagttagaacatgtactttttatacgtggtatactggatagagtagctgcccttgttttttatctgaaaaaggatagagcgaatgcgcgtgctgtaatgcaggcgaggagagaatttgaggatataagatattcttttgctgcttctcgtatagaaaatataatgaagtctacagatgaaatgatcccggaacggactcattttagtattcttatgaaatattatttgttgggtaaaaaacatttctctcagttgaaacttttttaaattgcttctctttatatttctttttatagcattattcccgtatctttgtttggtgaaattggatcaaaaaagaaaaggagctgtaaatgaatgttcatgaggtgaaatctattgaaacaaagtctattctgtcacgtttgaaaagtaaagataattattggggtattgcttataacatgaatttgtatagagggtgccaacatggttgcatttattgtgatacacgtagttgttgctatggtattggtgatatttctcatatttctgtaaagaagaatgctttggaattactggatcatgaactgggaacgaaacgtggaaaagcgaccattggtacaggctcaatgaacgatccttatatgccgttggaaaaacagatgaagctgactggaggtgcgttggaacttattgccaaacatcgttttcctgttcatgtgataacaaagagtagtcttgtgactcgtgatgccgatttattgcaggatatagggcgcacttatgctgccgttagttttactatcactacagcggatgacgagatggcgcgaaaactggagcctaacgcaccgacctcttccgagcgttttaaggcgatgaagatattgtccgatcggggtatatatacaggagtggcattgatgcctgttttgccttttataaatgattctatagaagatattgaggaaatagtggagaaggctgccgaagcgggagcgtcctatgtgcttcctttgtttggggtaactttaagacggggctcccgtgattatttttatgataaggtagagcagatttttccaaagatggccaagcgatataaaacttattttgaagaccgttctgaatgcacttctcctaatgcaccctatttgaatgaggtcttttatcgcagaatagaaacattaggaatcagtgctaccatgaaattttatcattctgaaggaagaaaacaactttctttattttagtaagtagagccatgaacattgtctgcatattcattattattggtttgtgttgttatttgcatgatagtatatttgcgttttaagaggtaggcatacaatagggtaaatttttaattaaatgactggatgtttgtcagataatttttttcatcgtgtataatgtacttctactccaacatttctgcaatcacttcccataggcggattttcttttgataaccggatgattatttcctgaatagttggaaattcactaaatagtctttgccctatgcgttcacagacatgttctaaaagtttggatgaagctttcatttcttttttgacaactgcatatatatcagcataacttacggtacctttcagttcgtctgtttgtgctgcatgggtgaaatcagttcttagttttaaatcaattataaaattagctcctactattgtttcttgtggatcgactccgtggtgagcgaaaaacttggcaccttccaaataaatatacatagatgttgctttcatattttttcagtttgaaaaacaaaagtagaactttcacttcatatctcaaaattaaaaattattgttcttgttttcttttttatctgttttattggtctattttatagtattaacacgaaatagagtcgatggcatgggtgttttcattaatttcgcataatatggaaagaaggattcgtaaattaataagggtaagtgccattacagtgggagccttgctgtttactgcgtttgtggtagtggcttttgtgattaactatgtatttacatcagataaattaactccagtagtgttgaatgttgctaatcgtttactggatgctgatttgaagatagaaagagtcgaattgactttcttttctacttttcctcaatttgggttaaaagttgatgaaggttttttggtttctaaggtcttgaacgatagtcttccacaaaaaactgattctttattggcatttaaagaatgtgtgttgacagtaaatcctttggattattttttgaaaaataagattagtgtccataatctatctttgaagaatgttgctgtttatgcttatcgaaataaaacaggtaaggcaaattgggagattgtgaaaacttcttcggatacattggctgtggaaaaagatactattccacaaaataaatttgatagcgagatagatatccgtcaggttgaattagaacatgtcaatttgatttttgacgatcgtaatacagaggtttattcacgtatagatgatgctgatttgcgcctaaaactggcgttgacaaaaggagcttcttcattgggagtagaatttgaaaataaaaatattcttttttggcagcaaggtgaattattgattaataaagtagccgttttcttgcagactgatattgaggtagacaggtctacggcattgtggacattgaaaaatacagggttgactataaatggtatccggatggatgtaaacggtgaattaagacgtgatacagttacaaaaacggtgggtatgaacttgaaatatggattacatgcaccttccatggaaaccgttatgaatatgattcccgaggcttatgtgaaacgtggacaaatttcggcaaaaggtgaggttaaagttaatggaacattggaaggtaattatggaaacaagcagcttccggcgatatcattgaatataaagataaatgatgcatccgcccgatatgaaggacttccttatggtattgataattttacggctgattttgaatcgtatattgatttgatgcgtcgcaacccttcttttttgaacttgaaaattcttcattttgagggagtacatactaagattctagcagatgcgaaagtggaggatttattgatagatccatttataacgcttcatactgaatctactgttgacctggatgctttagctaaaacctttcctttgcaggaaagtgtaactatccgcggtaaattagatgcgggtttaaacttaaaatgccgtctctcttctttgaaaaaacaggatattgggcgtatcaggttaggtggaagattggctttaaaggattttgaattaaaagatactgcaaagaattttaattttttaggtaatgccgatttaaaattcagtgatagtgaaactttgcaagctgaattggaaatcagagaaatactattgaatagtaggaaattatcttcagagatagatcggatgaaagcgaaggttgtttcaaccaatcctcaagataccacaaagattgttactttacaatgtgaattggaaatgaataaattgcgtgcgaatataggagattcgctcaaaatatatagtggcaagactactggaactggcgaacttgctccgaaggaacaaaatccggcgatgccgatgattaatttttccatgcgtacggattctcttttctttaatgctaacgaaacgaaattagcattaggcgtggcaggcataaaagtgaaattagaaaagaaaaatgattcgttatggacacctcgggggattatcggttttgataggttgttggtacgtgctcctgaatttggtttacctctgcgagtacgtaagacagctgtaacaatagatggtccgagaataacattaagaaatgcttctttgaaaatagggcattcagatatggttgctaccggggaggtaataggattatatcgtgcgatggctaaaaatgaaattttaaaagcgcgtttagcaatatcttctgagatgattgattgtaaccaattgattaattcattctctttatctgaagattcagcatctgtggcggtgacaaatacagtgcctccaacagaaatgaagctgtttgtgttgccgggtaatttggattttgaattacagacagatttgaaaaaagtagtgtttgaacaggtggaatttgaagatgtgtgtggaaaggtggatttgaaaaatcgtacattacatttaaggaatttgggaatgcgtgcattagacgctgatatgaaggccgttatggtataccgtgcggattcagtcagaggaggatatacaggctttgactttaaaattagggatataaatatagctaagctggtagattttataccttcaatggataccattgtacctatgttgagatcttttaaaggaagggttcagtttgatgtggctgcagaggcacgtctggattcaaatatgaatattcgtatacctactttacgttcggccatgcatataaaaggggacagcttagtattgatggatggtgaaacctttgccgaaatatcaaagatgttgatgttcaaaaataaaaagaagaatgtatttgataatatttcggttaatatagttgtcaatgacggtagtgttcttgtttatccatttcaagtgtctatagatcgttataaagctgctatagggggagagcaagggttggatatgaattttaaatatcatatatccattttgaagtcacccttgccctttaaggccggagtgaatatttccggtaatctggataagatgaaaatacgcgtaggtaaagctaaatataaagatgatgtgactcctgctgccattcataaagtagatagtacgcgtatggatttgggaaggcgtattgtggaacggtttcaccgtattgtaggggtgagatagaaaaagaatttacttggtttatataaaaagctccttcatgactttcgtgaaggagcttttcttttgtgttgttacattatataataaaccattatccacatcttgatgtgccacaagtcttgcagatcaagcatccttcttgatatacgagagtttcgttgccgcaattgggacatttttgtccttcagcactagtaccatctgttacatattttttcagtgctcgttctacaccgtttttccatgtgttaatgttttcactgtcaagttgcagagaatctaccagtttgataacacgatcaataggcatcctccaacgaagtacacccgaaattaattttgcatagttccaatattccttgttgaacttttcggacaaaccttcaatggttgttttatatccacgtttgttttcgaactggaaatcatatcgtttgttgccttcttcatcaatgtttttgatgatgcgtccggtagtgactgatttgggcaatgaaataccttcttcatcatcttgcagaccagtaaagatctcgtatggatgtccatccaacaagcctacaaatgcgacccatttttctttgttgttttggaagcgtactacttccgcttccagtactttggggcgcacttctactaccgtaggtggtttgcaaggaggaagttcttcttttttgtctttcttgtcctttttggtagaaagtaaaactccagagcgagagccatcacgataaacggtacatcctttacatcctgaacgccatgcctctacatacaagcggtttaccaatgcttcatctacgtcattgggcaaattgatagttacactgattgaatggtcaacccatttttggatgcgtccttgcatttttactttcatcagccagtctacatcatttgatgtggctttataataaggtgacttttctaccaattcatcaatctcttcttgcgtataacgcttggtgggatcgtaaccgtttactgtcatccattccacaaatttatggtggaatacaatatattcctcaaatgcatctcctgtttcatctacaaaatctacatgagtctgaggatcattcggattgacttttcttctacgtttgtataccggcataaataccggctctatgccagaagttgtttgggtcattaggctggtagttccagtgggggctatggtcaagcaggcaatattacgtcgtccgtattttttcatctcctcatataaattaggatcagcttcttttaaacggttgataaacggattatttttttctcgttcactgtcatagatagcgaatgctccacgttctttcgccatgttaacagatgaacgataggcttccagagcgattgttttatgtacttgttcagaaaactctgttgcgtcttctgttccgtagcgtaaccccatagcggcaagcatatccccttcagctgtgataccgacacctgtacgtctgccctgtccgctctttttataaatcttttcccataaatgtttctctgcttcttttacttcctcactttcaggatcggaatcgattttagctatgatcttctcgattttttctagttccaagtcaataatgtcatccataatgcgctgggccaatgctacatgctttttgaacaagtcgaaatcaaagtaagcatcccttgtataagggtttactacatatgagtataagttgatagctaataaacgacaagaatcgtagggacacagaggaatttcaccacaaggattggtagaaactgtacgataccctaagtcggcataacagtctggcacggattcacgtataatggtgtcccagaataatacaccgggttcagcagacttccatgcattatggacaatctttttccataaagcagatgcgtcaatttcttttgtgaaaacaggttgatcggaatctaccggatattgctgtttgtaaggagtgccatttacagctgcctgcataaatgcatcatctagtttcacggatacattagcaccggttactttgccttcggtcattttggcgtcaataaatgcctccgagtctggatgtttgatggatacgcttaacattaaagcaccacgacgcccgtcttgtgctacttcacgtgttgaattggaatagcgttccatgaaaggcaccagtccggttgaggtcagtgctgaatttttaactggggaacctttaggtcgtatatgagataaatcatgtcctacgccaccacgacgtttcattaattgtacttgttcttcatcaatgcggattatagctccgtatgagtcggctgctccatcaattccaatgacaaagcagttcgataaggaagccacttgaaaatcgttcccgatacctgtcatgggactaccttgcggaacaatgtacttaaagtgatccaataactcgtaaagctgctgtgcgtttaacccgttcttatattttgcttcaatgcgggctacttcatttgcaatgcgccaatgcatgtcttcgggagacttttcgaaaatgttcccgaaagaatcttttactgcatatttgtttacccaaacccttgcagcaagttcatcacctttgaagtattgtaaagatgcttcaaaagcttcgtcataggtgtacgtttgtttttccacttttatttttagatttactataatatcaataagttgttttagtgtagaagccgcaactcattataacaaaagtttcggcaaagctatatatgttttttcaattaacaaaataaaaagtagataagttttcaacaaattgaaagttatccaaaaatatttgttaatttattgattatcaaaagatatatgtgttggtttatttacggaagttttctattttgaaaatttcaatgaaggaaataagtgattgactagttgaaaagaccaaattcttagcatatattattttgcaaaaaatgaattattactcttttctttttttatctttgcaagaaaaatatatatggaatcgataaataatagacggacgatccgtaaatataagcaggaagatatttctgcttctttgttaaatgatttgcttgaaaaggcattccgtgcttctacaatgggcaatatgcaattatatagtgtgattgtgacccgtgacaagcagatgaaagagagattggcacctgctcattttaatcaaccgatggtaacaggtgctccggttgtactgactttttgtgcggattttaaccgttttagcaaatggtgtagagggcgtaaggcggtaccgggttatgacaatcccatttcttttctgaatgctgctacggatgcattacttgtgactcagaacttttgtacattggcggaggaaaatggattaggtatttgttatttgggaacaacgatttataatcctgatcaaattattgatattcttcggttgccggaattggttatgccagtggctactattacagtaggatatccggacgaatgtccttcacaagtcgatcgtcttcctatagagggtattttgcatgaagaagtatatcatgattataccaaagaagatattgatcgtatctatagatataaagagtcacttccggaaaatcatcagtttattaaagaaaatcataaagaaacattggctcaggtatttactgaggtcagatacaagaagtcggataatgaatgcatgtctgtaactttgaaagaaaccttgaagaaacagggctttgaaaaatgagttaccggaaactattaaccttaaaactacagaagtgcgcagagggaaataaagaaaataccctttgcgcacctctgtagttttatttctattttcttttgagagaagcttcaatttcctcaatatccgctttaaatgttttatcaacctccacttggtcttttactattttacaagcgtgtaatacggttgcatgatctttattacctattaattgaccaattttggaagaagaggagtctgtatgttttttggccagatacatagctacctgacgtacttgtaccacttctctttttctagttttggtatggatggcagattcctctatctcgtaatggttgcatactttctgtatgatatcttccactgtgacaggcttgctttcacaacagcgtacagcttttcgtacaattctttcagccaaatccaaatcaacatcacgcttgaagataatggattgtgccagaagtgaattaatgatgccctctagttcacgtacactttcatttacgttttcagcaatataattaattactgtttccggtatattcaaaccgtcacgacgtattttattgcgtaagatattctttctcaattctacatccggtttttccaattcggccactaagccccatttaaagcgggtcaggagacgttcttccataccttgtagcattaccggtgcgcggtcagaagtcaaaataagttgcttaccgttctggtgcagatggttaaagatgtggaagaacgtgttctgagttttggttactcctgcgaattcttgaatatcatcaataatcaaaacatctatggtttgataaaaactgatgaaatcattgaaatgattagtacgcacagagtcggtatattgcacctgaaacagatgtgctgatacgtacaatactcttttttcaggatataattccttgatacgagtaccaatagcattagtcaagtgagttttacccacgccggacggtccatacaaaaacaaaggattgaatgtttttgccggatttttagctacagtttcccctaccgtacgtgagaactcattactatttccttttatgaaattctcaaagttgtaatttggattcaaatgtgggtctaaatcctgcggagctggtgcctgcattggattaggtgccttgttaccatctcgtataactgtttgtgtgggtagtgctgaagagcgtttgcttccctccatgtttacagttatatggttggttttatcggtcaagatacaatacataagctgcgttccctccccaatttctttatatagggcagcgcgcagcaagtccacaaacttttcttctaaaaattcatagaagaatgggctggggacgccaattgtcagtgccttgtcctcatatttaagcggtacgataggctcaaaccacgttttaaaggtcgtttcaggtacgttgtctctgataatgttcagacaacgaccccataaaacgacgtgatcgttttcaatcatatgaaacatttattataaaaagcgaaacttctacaatgcaaatttcgaaatgaatttctgaaaaaacaaatcgcttttttcttgctttttatttttaaagagtaatctatttagtttcagtaacttataaaaaactctatctaaaggcttctgaaatatttttgttatttgataattggctgatttatagctgactatctgtcaaaataggcttttatttattttaaatgaaataagtctacatggtatttctgccctatttgcagtcatttactgaaaaaaggtagaaaaatggttaagtagacttatttagaatctttttaaattaacaaatctgttacttatctttcttcccaaacaaagagaaatgtacataacgtttaggatgcgctttcaaatcctccaataaggttgcagcatttgctgttgtcgcactcagattttggtagaaggtaggatcattgaatagtaagccgatactgttgtccttgcgattgagtttttctgtcagcatttgtacattatataaagtggaatctattttattgaatgttgatgcataatcaatacctttcaagttgtcgctgatagtaatgaaattatcagcaatcgtgtttagttttccagtaagttgcggaagatccctttgcattaatatgtttaattgacgtgttgtcacatccagattggctgtcagtttttctgcgttgtgtaaggttgcacccaatgcaggatcagctaatattttatttaatgaatgtaggatagaatccattttgggcagcatctgctctatttgaggaactagcttttcttcagcggctcccatgagtcccgcattcgttttgccaggcagtgtatcccccggttgatagtattctgtagaattaaagttaaggagtaagttcatctttactgttcccagcatttctgtaaccaattctcctgcacttcctttagggatacgcatttccttgtctacttccacttctactgtgacatgtcccggtttagcatagttgtaattgatatttcttactgtacctactttgtaaccattggcaaagacggggcttgatccggctaatccgtttatattggtatattctacataatagtagttggcagattggaacatatttattcctttcaggtagttgataccaaagatcagcatagccaatgcagcgatgcctattaatcctatttttacctctttcgtcatttcaattgtaccttttatattatctattctttttaaattctttgatggcttcgttcacgttcattttctctccgtttttgaaagcgataatgaaagcgtccttaaatttaggagtaatattacgtttcatgcgtagtattttattataatccgtactttctccgtaagtatatttataaagtcctttttcgcggtaatagctaacgggtgatacacctttcagttgtttgcttcctttgggtaatattttgtttgataccaatatttgtattttaaatacaggcttggcagatgttcgggcttggtcgcctgtgatctttttttgtgtggcaggcacaggctttttggtaactttgtcaggttccgttgcagtgtctggttccgcagtttgtatttctattcttgattctttcggtttgttttctggttccggcaattcttgtccttgtactctgctgcgaccggtgggggcatcatgttcgcgcttgtaattgaggaatgctttataaatgctgttagataatgccgtagtgcctgcatcggataaaagatattgttcttcatccggtgttgagatataacctaattcaaccaaaacactaggcatggaagtggcgcgtagaactagaaatccggcttgatgtactcctttgtctatccgtttggctgtattcttgaattgtttttggataagagtggctaattttacactcttctccatatttttgtcttgtacaaattcaaaaataatatagctttcggaagaatttggattgaatccggcataacgttgttcataattatcctctatcaaaataaccgagttctcctttttagcaacttccaaattttcttcagtacggtgaagtcctaacgtataagtttctgctccccgtacagttctgctacgggctacagaattggtatgtatagagatgaataagtcggccttagcattattagctatttgtgcacgacggtctaaagggataaagacatctgtctttcgggtgtatattacctttacgtcattacagttattttggatcagttgtcctacttttaaagctacgttcagattgatatttttttcttttccacgtctgccgatggcgccaggatcatgtccgccatgaccgggatcaatgacgactataaaatcctttccctttgccgtcaggcagaaacaggggaggaccagccacaggctacacaacaggaatattattttaagtctatcggttttcatatcaatcaagttgcaaatgtagcgatttttagtgaaaactcggcttttgtctttaagttttgcgttttttattcgaaacttgccacaaaacccgaaaaatagacgagtatttggactaaattcttttattttgtatcccaaaataagtattgaaagatggatttgcttaagtttatgaagaattggacgttacctttagctatgcttgcaggggttatcggctattttgtttttgccaacttcacttttctggagccgacaaagccatttatgaatgggttgatttcttttctaactccttccttgatttttgcccaattgttgcttacattctgtaaaattgaaccaaaagagttggttcctagagtatggcatggctggttgttggctattcaagctatttcttgtggtatcattgcgttgttgttgatattttgtccgatggacgaatcttataaggagatattcgaggcggctatggtttgtcttatttgtcctactgctacggcagcggcagtaattacggggaaactaggtggaagtgcttccagtttgactacttatacattactttcaaatattttggctgcaatagcagttcctttggtatttccattggttgagccacatacggatgttacttttggtattgcttttcttaagattttaagtaaggttttcccattgttgcttgcgccgttttttatcgctttattattccgttattatatccctcgattccataagtttttactggaatatcatacttcagctttttatttatgggcgatagcattgaccattgtaatggggcagactactcgttctttggttaacagtacagctgatgtaacggtagagatgttgattgcttttgctggtttagtaacttgttgtttacaattttattttggtaaaagaattggtagtgcatacaatgaccgtataagtgcaggacaggcattggggcaaaaaaatactgtactagctatttggatggcggttacgtatcttaatcctttatcatctgtcgggccaggtagttatgtggtgtggcaaaacctattcaatagttatcagttgtggaaaaagagaagggatgagataaaatattaagtataatatgttgatatttagtgatttgcgtttattgaatgtgatttcctttattttctttgttttcttgtttagtctaataaatgcctttattttgttactattttgttacccgtattcattggagtaacaaaacaaatcgctatatttgtatcggtaacaaaataagaacataattatggcgaagaaaaaacaagaagttaaattgaaagaacctgtaaggattagattcaagcagcttgccaatggtaaccagtctatttatttggactactatacaggtgatgttattagaaaagaaaattatgttggcggtaaacggcaatatgaatttttgaagttgtaccttatacccgaaaaaacgagggaggataaggcgaagaacgaagctacattggctcttgcaaaagcgattcagagtaagaggatagtggagttgcaaaatgatgcacacggttttcagaacaccaacaagtcaaaagcgaatgtgattgattatttaatgaacatgagaagccaatctaaagaacgtggcagcttgaactatgaaaagactgttggtaataccatccgtgaactaaagttgttcagaggggattacatcgcttttcgtgatatagataaggacttcttaaatagctttgtggatttcttgaaacaagcgaagaaagcaagcaagtttggtttgttaaaggctgggggagtattaagtaataattccgttattgcttactatggggtgttgcgtaccgctataaatagagcctataaagaggggattattacggtcaatccaacgaaagagtttgattttgccagtaaggtaaaagcggaagttagccgtagggagtatttgacaatagaggaattgaagcggcttatcgggacagagtgcaagtatgagataatgaaacaagcctttcttttcagttgtttgtgtgggctgcgtgtaagcgatataagaaaattgaagtggaacgatttgcagaaaagcggtgaaagaataaggattgaaataaagatgcagaaaacaaaagaaccgctttatctgcctatatccgatgaagcgttaaagtggttgccgcaacaaaatgaagcaaaaggcgatgatttgatttttcctttgacgcatgagggaactataaataaaatacttcaaaaatgggcgaaagatgcaggggttattaagcatatctcgtttcatgtcgcccggcatacccatgctaccatgatgcttacattaggggctgatttgtacacggttagcaaattgttaggacataaaaatattgccacaactcaaatttatgcgaagattgtcgataagaaaaaagaagaagctataagtctgataccgaatttgacggactgatttaagaagaaagtacggttatatcacagttaccgtactttctttctttttttgtctttgtttagccggaaaaatatatctttgtttctactaactgaaacatagattattatgacagaagaagaactgaaaataaaattcgaccatatacaaggtatattcaatcgctgtatcaatcatgccagccaagttatgatagataatattgcctctaagtccttatatttcgacgaagaacaggcagataaattggaacagcaagaatatgttcgtaccgctgatgagttggtgcagttatatattcgttattctgtgttgaatgatattccatatttttattctgtatctgacttcttttgggaaagcggtttttatgaatccttgaaatccgatgagaaaagaaaatacatgtcgtttaatcctctttcatttgattattcccggtatgagcaagataatacggtttatgatgaagaactgccttatttttccgtagttgttaaaactattgtattagaaagatattctgcgtacttgcgaaaaaagaaagaaagtaaggtgcaagcggaaatgcagccacaacagaaagagccgcaaccaattcaagataaataccaagagcctaaaattatctcccatattgctgaaacagaaaatccgttcaagtctattttaaacgacaggcaaatagcattgttggtggattgtatcaatgaagtggaaattttcaatgctcctatgacttttgaagatttgaaagcaatactttcttgtaaaccaaaagttatattcaggtctaataacaacaggcaggtagcttttcttttttcggagttaagcaatcgtggtttgataacacctaactggcaatctgttatagcaaagaataagttgtttgttacgaagaatataaagaaagataaatatctgaatcaaggtgatttagccacagccgccaattatgtaaaaggggtggaacatgaaaaagattatgtaaccatcagcaattatatcaaacaactgaaaaaactttaagaataggttaagacctcaaacatagcttaatccgctatcaagctattcctcaatacttttgcccctgtaatcgattacaagaaaccggagggcatgcactccatattgtctaacgcaaatacttttgttatatggaaacaagtattgagaagcgagttgcagaactcgaaaatttagtgttcctttcaaagaatgtgcttagcttcgatgaagcgagcaagtttttgaacctttcaaaaagctacctgtacaagctgacttcgggtaacttgataccccattacaagccgcagggcaaaatgctttattttgagaaagcggagctggaagcgtggttgcgtcagaacccggtgaaaacgcaggcgcagatagagcaggaagcgcagaagtatatccttaaccgtcctctaaagaaataacggttatggaaaatagaaaagcgacagaagccgggcaggatgtcaccatgcagaaagaggatttcgcagccctttggaaaaccattcatctaaaagtgacggacacttacgaagtaccgcccgaaatgctttgggtgaacggttctaccatcggcacgctgggtaatttcagtgcatccacaggcaaagccaagagcaagaagacattcaacatttccgctatcgttgcggcagcgttgaagaatgacgaggtactgaagtattcggcatgtctgccatcgaataagcggaaaatcctctatgtagataccgagcagagcaagtaccattgccacaaggtcatggagcgtattttgcgccttgccggactgcctactgacaaggatatgaacgattttgttttcattgtgttaagggagcagacacccgacaaacggaagcagataatcggctatatgcttgaaaatatgcccgatgtaggactactcatcattgacggaatccgtgatttgatgtacgacatcaacagccccagtgaatcgactgacctaatcaacctcttgatgcgctggtcaagcggatataacctgcatatccacactgttctacatttgaacaagggggatgacaatacaagggggcatatcggtacggagttgaacaacaaggctgaaaccgtcctgcaaattacgaaaagccagcaggacggtaacataagcgaggtaaaggcgatgcacatacgtgaccgggagtttgacccgttcgcatttcgtatcaatgacaacgcattgcccgaagtcgtggacggctatgtgttcaagcagcccagccaagaccggggctttccactggcagaactgacggaacaacagcacaggacagctttggaaaacggttttggcaaacaggtcatatatggttacgagaatgtcctaaagactttgaaacaaggctatgcaagtataggctacgagcgtgggcgcaatatccatgtggaactgaacaagttccttgtgaacaagcgcatgatagtgaaagagggcaagggctaccgctataatcccgatttccattattaaaagtcagtttggtttagtccgggtgtatatataagaggaacggacttactatttccctgcatcggaacaagcaggtttagtatggtacgggtatatatataacggactaaacaggattggtgcatttttcaactattttttaatccccaaaaaaagaaaatgttatgaacatcgaagatgtaaaacaaatacccatcgcagactatctgcatagtttaggttactctcctgtcaagcagcagggtaacggcttatggtacaaatcaccattaagggaggaacacgaaccatctttcaaggtgaacactgaccgcaacctttggtatgattttggcgcaggcaagggcggcaacctcatagcattggcaaaggaactctattgttccgacagcctgccataccttttaaaccggatagcggaacagagaccgcacgtccgcccggtcagtttttcttttccccagcgtaggacagaaccgagtttccagcatttggaagtccgtgaccttacccatccggcattgctccgttacttgcagggacggggtatcaatatcgaactggcaaaaagagaatgcaaggaactccattttaccaataacggcagaccgttcttcgctatcggtttctcgaacatggcaggaggttatgaagtgcgcaactcttttttcaaaggctgcatcgccccgaaagacatcacccacatacagcagcagggagagccgagggagaaatgtttggtgttcgagggtttcatggactacctctctttccttacgctccgcatgaggaactgtccggccatgcccgaccttgacaggcaggattatgtcattcttaactctaccgctaatgtgtcgaaagcccttgacgtgatgtccccgtatgagcgcatccactgtttgcttgataatgacaaggcggggtttgaagcgacacgggctatcgaattggaatactcctaccatgtgcgtgacttctcgcacaattataggggctattcggacttgaacgattacctgtgcggcaggaagcaggaacagaaaaacgcagccagccaagtgcaggaaacgaagcaggaaaccggacaacgtgccgccccaagacaaaagagaggcagggacatttaatccggcaggactatcaacggctggcggtttatttggagagcaaggttatgtttcggtataccgaaaccaccttgctttgctcaccgcaaaggaaatcgctcccgttggtcgcaatttctaatataccacctaaaagtaaaaagacatgaagaagatacaggacaagctgggcggtcgtccggcaaaaaaacggacggacaagcagaaaaaagtagtcagtacgaaactgaccgagttgcagtattacgccatcagaaagcgagccggggaagccgggttgcgtatcagtgagtatgtccggcaggcggttgtttcggcagaggttataccccggctgaacaggcaggatgcggacaccatccgtaagctggcaggggaagccaacaatatcaaccagctggcgcaccgggcaaatgccggaggtttcgcactggtggcggtggaacttttgaagctcaaagataggattgttgaaatcataaaccatttgtcggatgattggaaaaataaaaaagggaagcggttttaagggctgtgtgaactatgtgttgggcaaggagcaggcggttttgcttcatgcggacggggttctgactgaaagccggggcgatataatccgcagcttctgtatgcagaccgggatgaatcccgatttgaagaagcctgtcggacacattgcgttaagctattcggcagtggatgcactcaaattgacagacgggaagatgatacagcttgcgcaggagtatatgcgtgaaatgaaaatcaccgatacgcagtatatcatcgtgcgccaccaagaccgggaacacccacatgtgcatatcgtattcaaccgtattgacaacaacggcaagaccatttcggacaggaacgacatgtaccgtaacgaacaggtatgcaagaagctgaaagccaaacacgggctttatttcgccaaggggaaagagcaggtgaagcagcaccgattgaaagagccggacaagtcgaaatacgagatttacacggctgtgaagaatgaaatcggtaaatcccgtaactggcagcagttacagcagcggttagcggaaaggggtatcaccgtccggttcaaacgaaagggacagaccgatgagatacagggcatatccttttccaaaggcgaatacacgttcaagggttcggagatagaccgcagtttcagtttttccaaactggataaatgtttcggggatgcaggaatgaatgttgccgaaagccaacggcaaacaactttcgcacccgttcgggagcaagcacctgcaccgggcaaggctgacagtccgttgataactggttcgctcggtctgttttccgcttcttctcccccagtggatgaagaacctaattttaatttgagaaagaagaagaaaaagaaaaaacaacttaaattgtaaagacatggaagataatttgattttagaggggcttctctctatggttacggaactgaaagagaagctggaagcacaggtaacgccagccagccgggaggaaactctcgaacggctgggaacaatcgaacaggcattgtcggaactgcacagtaattcggctgttcccgaagagaagttgcaggttatccaaagtcagcttgacgacataaggagcaggatgcaaggtcagcagaagaacatagaggacaccaagaaaataacattggaaacctaccgttgtttcaaggtaatgattgatactttgggttcttgcaggacggataaagaggaagctacgtccttaccgttctatcaacggatttacaacaaggttacttcttgggttcgtccgggattgtttgttttttcggcagtgctggttatttgttccgcttccatattcttgaacgtccgtttggttacacgtatgcagcagttgcaggacaacgatataaaataccgctatttgctgatgcaaggacaggcagacggagaagtctttgatatactggaaaccaaattcaattggcagagagataacggttttatccaaagtctaaccgattctgtgatagattttgagtatcgcagcaggaagcaggcggaagcgttggagcgtgcaaggttactcaatgaacaagccgagctgttgagaaaggaagccgataaactgggtaagccataagcggagtaaagccggagtgatgaatcatgtttatcgcccggcttttcaaattcatttatttttcttcggacagcatgtcgttaggtattcagaagaataatttataacaaagtatgcccaataaaaataatcctaaaaggcatattgcaaaaattatatatgccttgaatagataaatttggtctgactgttcttttgctatggtatttttacggatttcctctatcgtttcaatggaaatgttggataaattaatattttttcccttgtttacgaggtatttatgatgttctttcatcctttctttattcaatttgcgaagctcacggttctctttgtcccgttgtagcatatcatttatacagcctaatgttcccattttttagtttaaatttaatttctgttttgataattcaattataatcacgatgttcattcaaggatttaccgattatcatttttaaataaaacaggtacagtccaaacggagttgtgatattcacctttcccgtaataattgatggtaggagtccaccgtggcataccttttatgatttgcaatacttgcttatcccattctggtatgccgcaacttcgtaaggtttctacctttattatttctccgtaagaatcaattcgtatcgtataaatccctttggcttcttttttgccgttcaatagcttggggtcgtatgttaggcgttcattgatgtagttggtaactgcatacggatttgctttttcaaaataagacacagtttcccattccacaaaactttgtttcaattcttcctttgcaatgctgtctgcttttactctatctctataatgttgtggtaagaatggtacatatactgtatggaagcattctattcgtttaccgttcttatccctgcaaggcagacagtgtggaagttcttttgttaatctaattatttctttgtcaaactctttatggatagtagtcagaatattgatttcacgaggtaaacccagtgtgtcgatggaaaacatcacaacagaatgacctgccacattctttttcagtaactctttggggtatttcatttgagaaacgaaatacttttccaagtcataatcccatacagcccatcggggatattctttgatagcctgagttttattgataggagcagtacccttgttccaaatatcttctttgcgccaaatactatccaaacgttcttcgttctctcgttgcccttgaatactgttatctgttgtacatctgacaggcgtaactccgattgtcaaactttccggtagataaaggaatgtcagagtactatctgtaagttcttgaatgatataatttttacccgattcaaaaactttgattgtatctccatgcaaagaataggaatagaatgttttggtttgtttttcatcatatagaaatgtagttctccatccggcactacgaaattccatttccattgcatattgtttgtctttaggaagttgcactttccatattttgttctctaataaagcagacatatttgcacacttcttgtcttgtgctaaaagtgggctgacaagattgaaagaaaatataaataatatgggtagaaaatgtttcataaccaattatataaacaatattcaaatatagtgaaagttaataatagaacagcttgttaagctatttctttcttattaagtttgaacaaattaacttttaatattcaagaaaaggctttcctatacattgcaagtttagtttatccctttgtctatatatccaaaacgaactaaacctacttttatagacagcaaaatatatatactggcgaaaagaaaaacagtattcttcttttcgccagttttacttttatggttagagggcttttgttacctttgcacatgaagcccaccacaaagcgatttcttcgtttttttgttactattttgttacccactattagtaataggtgggcttttactctgataatcagcattatattatgttgtatatataatatgtggcaaaacatcatcaatagttatcagttgtggaagaaaagaaaaaatgagatgaaaaattaagtcgcagctatttactttgttatacgtaatgcttggtatagtaaagtatatagctgcgttccattaaaaatgaatttgccgtatatatctcttaaagatttcttacgaaacctgcaaaacgcttcaatccttctgccagtgtagtacgtgggcaggcgatgttccagcgcatgaatccttttccttcagtcccgtacattgctcctgcattgagccataatccagcttcgttaaccaatcgctgttcgagttcctgcgagtgtatgccgaatctgtgacagtccatccaaacgagataggttccctccaatgccgtgataggaaactcgggcagatgctcccgacagaactcctgcatatagagaaaattggcctgtaaatatttgatgagttggttcagccactcttcctcttcgttgtaagctacttgagtagcaattacaccaaaaggattgacatcacatacttcgttatcgttaatggcccgatcgattttcgcccgacggtcagcatcagcacatataatgttcgcaatctgtaatccggcaatattgaacgctttactgggagatatacagacgaatggtgacggaaattttctgagatggaagcaaacggtgtgtaacggtactctggaaaaaccagttcgcaatgaatctcatccgaaacgaccgtaacatcgtggcgaatacaaatttcaccaatacgtaccaattcttcacgtttccatactcttccggcaggattgtgaggattgcacagcagcatcaccttcactttcggatcagcagtcttacactctaaatcttcataatcgatggtgaaagtattacttgcaaagatcaacggtgatgataccatttcacacccattgttacagattgaagaaaagaaacaattataaaccggagtctgcaccaacaccttatctcccggaacggtcaaagccttgatgactgccgagatggccgggactacgcctgatgtgtaaattatccatgtgcagtcaatcgtccaactgtgacggcgtgcgaaccaatctgtaacagcctcgtaataactgttgggcacacgggtataaccgaagataccgtgttccacccgtcggcgtaaagcattgacgatagcgggggctgtacggaaatccatgtcagccacccacatcggcaatacattttcgctttctgagctatcccattctttttcttgaagtcttctattttaagtattctttgaaaaattcctccagcttatcgaatggaataatgtctgtccggtcatataaatccgtatgtacggcaccgggaataatcatcagttctttattgtcgcctttcagcttcttgaaagtatcctcactaaaatagcgggagtgagctttttctccatgaatgagcaacacggcactgcggatttcatcggcatacgcaaggataggtgcgttgagaaatgcaagattggaggttttgttccagcccaaaccggagttgatggaacggggataataacctcgttcggtcttgtaataatcgtaataatcctttatgaactgtggcgcatcaccggtaggctccgggttcatcacggtgcggggataagtgtcggtacggtagtcttccgtgcgctgggtgttaaactcctgacgtattttgtagcgtgcatccgcattgtctgcggcatcgaaataaccgtttgctgtacagcgactgatgtcgtacatagtggaagctaccgttgccttgatacgtgtgtcgttggcagccgcattgatagcaaaaccaccccaaccacaaatgccaatgatgccgattcgttcggcatccacatccggacgtgtcgcaaggtaatccaccgccgccgagaagtcttcggtgttgatgtccggtgaagccacgctgcgaggctgtccaccgctttcaccagtaaacgaaggatcgaaagcaaccgtcaggaatcctcgttcggcaagtgtctgggcatacagtcccgacgactgttcctttacagctccaaacggaccgctgacagcaatggccggcagtttacctccgaaaatcgttttcggtgcatacaggtcggcggcgagcgtgatgccgtaacgatttatgaaagtcactttgctatggttcaccttgtcgctcttcgggaacgtcttgtcccattcctgtgtcagatttaactgttccatatttttgtgagtgttttgtgccgggctttccgtcaggccgaagaggcagaggaaagcagccattaaaatagttgtacgtttcataaccgatgtaatttaaatttttattgttttctttatcatagtgcaaaattacagcggattacaggaaaagccggtagatggattactgattgtataacctcaattacagacatttttttacatgtgtctcatccaacgttctcgcttcaagcggaccaggaaaatcagccccctgaaacacagcttgatgcacatggcaacccatacacttttcagacctaatgacggggcgagcaaggcggctaatgacagacgcaccgcccggatattgaagaaattcatcaagcacgggacaagcgtatccgctgctccgacaaagacaccgtaagtgataatcgaggctgcaaacatcggctcagcgaacgcttcgatgcgcagtgccattatgcccaattcccgaatctccccgacgggggcatctaaccgataatttggggggcgaacagatacatgagtacacctataaccccataacggtcataccatataaatatggtaatgcgggcgaaacttcggaccagtttccggtgatcggcaccgatactctgcccaaccagtgtcgtgcagcatcggcaatcccatactgggcatatgcagaggctttcggctgtaatggcaaatgaattggctgcgatggcgaagacgcccaacggagtcacgataactgttgtcatgatttgcgtaccacaaatgacgatatgctctaaaccggatcggattgtgttatggcagttgttcctataacaaataaacttgcaatcatgatgactgatatacgtttcattatcacttgattttattaagttttgaatttcagaatcttgatgcaaagataaatacatgactgaaaatacagtgtagataaattacagatgttataaccctaatgacatgattttcggaaagaatagtataaatctgtagccaaggttgatacaatgtctcaacctgttattctagaaaatgataagtatagagtttgaaatcttaaattgatgttaaacaggaaattaggcaaggattacagctacgtaataccccggaatcgagcgagtgactacactatcagcatcagttatgttatttttaccaatagtaaccggagcgtatttgcaacaggtgagaaactgaatactgcaagaaattatcatgttgcctctttggttgaaatagtgctatgaaatagagattttaacccatcgaaaatggcaggaagagcaatagtgccatgcacctcgtcgggaaattttttataaatgacatgcaaatgcttgtttttcatttcagggatgatcttattttttaagctgtcggccaatgaaaactgaataagtttgattgcaggacgttggcgggtagcgaaagcaacatacaaatgtttgccggagaagtctttttgataaacattctttgcagcttgttgtagaaaaactcctcggtcccaccataagcttggatctattgctatatacgagtcaaaagactcggggtgatttgacagtgtctgtagggtaaataaacctgcgtatgaatgtccgacaagaaagtttgtaccgttggcaggaactttattttccacttccagacgtagttcctctatcagaaagcgatagaactgttcagctccaccacctgccggcttatcatagggacaaatagtaccatcccggcgggcggctgagcaggtaggagtgaaatctctggtccggtttgtgtttaagacagcaacaacgatgcaaggaggtaaatttgaggttttagaagaagagaagaaacgcgtaaagccaaccacggaatgaaagaaggaatctccatccaatagataaagaaccggataagcctttcctttttcacctgctttggtctcaggtacataaatccaatattttctttcttcattcagtatttcagaaaacaatgtatgacgcgttccgatataaatggaatcttgtttttgtgcggagagcgggaatatccatcctatttgtataaacagtattatataaagtttcttcatttattcgttttttggggttgcaaagttcgatgaaaatgtggaaatggacaatccctatttttaggtatttcagaatatctccgatggaaattccctctatgttttatgattttgtggaggtggcaccggatgcatcggaaggaattgattgaaccggatttttaagtaacttcttaggggaattcattaaaatatcctatcacttctaacatttcccgattaattttgtatttttacagacatacaaagattaactgtaacaagatatgattatttctgtcgtcttagtatctatgatggtggttttcgtaacagtttatcattttgttacaaagccgaaaaagcagcaagaaaagatttattcggcgatgaccaccgatgagcttatcaggttcgtgcagtccatgcactgtgaactagtgaagagaattgatgctgatgccattatcatcggttttcaaggaggttattttcatttattaagagaaaaaacaggtcagaatattcagttatattataaagatttctatgcatgtagctatgaacagtctaaaaaaatagtttttgacattaacaacattaactgccgatacacagcttggacttgctatttgcgtaaaggtcatgaggacggagaaagtgagacaccttttacggcttgtctgtctgcctgtctgttcttgtcgggcagtgaaactcagttaaaacaacatttgcgggtattgcttgagtcatcttttatgatagcccgtagttttaaagagttggcagaacaatctgcttcaatacaagacgtgttggtgaaaaaagaattcgaaaatcgtttggctttgttaagacgaaaattggagattggacatggtaagctgttggaacctgtcgatgtttcccggcaagatatggatcagatagaggatattctttctctttttggtacagtgaaacaggaagatataaagggaatgacactggtttgcaatgggcggatagagaggcgtaccgaattattgtctattctttcttttcggttgaaagatgctgtgatggatgaaaaaggacaggcgggaaaagatgctctgatctgtatcacacttgctgaagggcagttggtgattgcgttggagaaagctgaaggcagtaatgaacgatctctttattataagttgtcggctatgcggacggacagagtggatgcttttttcgatgaaacccaaaaaggcagagtattcagtagtatgattgaggttagattgacaacggatcatgatgattattgggagttgaaatatatgttggacgatgctaaagaaaaagcggaaaacaaacagtttgacgaactgacggaggaacaacaggcgttgctggcttataccgagcctaccttgcagactactatttattgggggaagaaatttttcaggcagcaatgttatcttcaggcgttggggtgttatctttctatttttcggtattatcaagtccactggacggaattgccggagcgtggcaaggaagaatattatgtgatttgttatcatatcggttttgtttatctcacattagggcattttgaaaaggcttattattatttgactaatgctaaaagaaattcatccattcatgcgattcgtgattttaccaactgtctcgtcgaaatgaaggatacaggagctcttgagtatatttattctatggtgagtttggttggcagtcagataaagatgtatggtgatgaaaagaataccttgtttccactttatcattttcttcggcgcagggcagcacaagtattagtaaacttgaaatattattcgcaagctagggaactgctctatcaaatgctgggagaggaggagaatcgtgagtttgcggaacgggaattgcagtatcttgagagtatgggtgcaagtgatgatgcgaagcggaacgagtgagaagaatgtgaggaggttgaatgaaagtttcatggaatttcataatgggatgttgctaggagtaaagcagaaatgtggaaaatgttctgtaacatgggctgctcttcattgaactctgtgaagttacattttgtttgtattgatgataaagtgtaatccctataccgtccttctgagcttttgatctgatggtatcttgtcaagtatccttggatgagtaaaggttgtttatctttctcatctctgaaagaaaaggtataggagtagagttgtccgatgcagcatattatgctaattgattgtcattagtttacatcaaaagatagaagcctctaaaatttacttgtttttcgcaacaaattgatgatttaacgatttttttcatcctctttctccaaacagagagaaaaaaggcaaaaccgtcttttcggctcccgactttttgttggatcttcgatcagagggtgagtacaagggtctgccagtcagccagttgtttccggtttctccttcgggacatccttggtttccaggctacgatgaagctaacagttgtggatttgatctaataactttttgcaaaccaatcggtgagtatcttttgcattcgcatcgagagcttggttacgggaaggtctgtcttttcggtaaagagcttaaagctgcggtattgcatagaaacaccgctctgcagtgccaacacctcgtatttgattctcttgaaggaccctaggcggtcgtccctatgaagagagttttatacttgattttttttaactcgatactcttgtatgccgttgatgtgattagtgtttcctctatagctctgccgtataaaataagcattccctatagaattaggtaaagtcgctctataattgaagagagcgactttacttacgatttaatactaaccttcctgatatatccagtaatcattatcctttctattatctttgaaatattgaatacggtcaacgatgtcaatgccttctttgttttgtggaatgataaatctggcacgctctttattgtccttcaaagagtatgatacaaaagcattgttttcacatctcaacagcccttttctgtaagagagcgcacggatatcatatcgttctacagaatttgctactgcttgtccttcaatgagtgcttgaagcatacattggtaggcattagatgattcacgcttttcagagtgcaatgccacaagagcgtatggttgttcatcatacatagtatatttgccataacgctcggggcggaagcatggatacgcgatataataatatcgccaatcgtattgacttttagtcttgcattctgttagatacgcatcaattttttcttgtaagtaaatgtcgtctatttctatatcaatctcaagcagagaacgtaatgatttttttgtcttattaaaatctggatttttgcctgtcggatgaaataatgcataccaagccttattgccaatttcatcctgattcccagaaccaagttgaatgcaccaattatttatcctttggctataatcatacgttgctaacattgcacagtcaataatatcgcgagagcatctatcaaagacatggatgaatcgctgataaagatgagtattctcatacccaacaacatctgtacgaccttgaagcagatagtgatcctccaactgaaaaagaccagcagaatgctcgggatgttctttggtaaactggagcttttgacgctcctcttccatctgaattacattgaaattcagtctcacgtcattatcaatcattatactatctgcaatttccccagaaagaataatattttctacctgacgaagatttgcgggcatacggtttcctgcatcaccattaggggtatcgacaacttcgtttctggaatttttgagcagattcactaccacacgcaagcgtcgacggaaatccatttcttttatcttatcatagttcattaaatagataagaaaggagtagagcattattaaccaataggtagtatttttacgcaatgcggctccggtcaatacccctttgaaaatattgagatctgtaatttgttgagatacgacaactttttcgtgttcatgataatcttttgacaggtaagagttgaaaaaaatatcaattgggttaagtattaatgaattagaacgtcgcgctttgttttgaatattgaccatgcaatcaaaggcttgttcaaaaaacactacattttttggttgattcttataaagcctttccagtaaactgaaatcatcttctaaatcaaattctgatgaagagcgatctgacttatagacaagaataagggaaatcacatggaaaaagtttagaaaaccgctatcgacgagattatactcatccctataaatccaaagtaaatcggtccattcgcggtctatcttaaggccaatgcgtttagcagtagcttcatcgtcattttcagaacgcataacctttaagagttctgccttaaaatgttcaaagtcagtgagtggttttccacgggagttcatcttgatgtaaatgtcatcggttaacttcatctcctcaatatcgcggaaatagaaattaattttatccaatttgttccataagtcattaatatcggcaaaacgcttttggatttcatcaagcattgtgagcattcctctaaccgtaggatcgttgctccattccattggaaaccatccctcatttttaatttcatcactaagatgtgttttccatgtaggttcgtagttaacgagctttataagaaaatctctcgcgctataacgtgtgttgtatgaaaacctcgcaagtcgcttatcgttgatgccctcttttttatctgcataccaatgaagtagccaaagagtagttagtcgttgctgtccatcaagaggaatcagctgaccattctgaatattaccataaatgaaatcgagggttaaaccattgtttattaatccagcatgtattgctgatagaaaacgttcacgagtctttactgcatgtgcatcagatcggccttgtgcataagcacgttgaatccgtggtatagtgattccacttattccgtaaggattgttttcagaaatcagattcttcagtgtcgtagtttccatttgtcaagttgggtatagtggtatcgttattatcctgtttatagtaaggtgaaattttctcattaagggcctcggcataatctcttcggtctgtctctccccaaaagaaaagcgatggaccctcttgagtatagtacttgaagaatacgtgttttgtacaaattggaatgtatcttccttctttatcataattaatgacacggtgtcttttaacatcaaaaacggagttgctaagagccgcgttttgagatacatctagcagtgccatatttgctaatccatgcgagtagctattctccttaacgacatcttccttagacgtgaatatgataattacttccttctgaatctcattaaagcgttcacgcacattccctggatccttatcgctatgaagttgttcaatcaatatctccattttctctataagttcattatttacctcaaaaatagaactttcagaagatttcaaaagtgcaatatgactttctagccatgtaagaatatctttattctttttaaggctttcggcattttgagcgtggatatgctccaaactccatatagaatctttatgtttgtcaaatgggaaccttcgtttaccatcgtccatcagacgttctgtttccacattaaacaaagtcaataccttttgtagtttgtctttccttgtatcgtatgataagctaagtaactcttctttatctttaatgcttattgattctgaaatcattttgtcgagctcgctaagaaatatatccttagcaagaggagtgttgccatcattttgccatacggtataaattttccttagtggaactcctatagtaatcagataaccaattttatggtaaaagtcatggttcgtataccattcgcggagtgtaagaaacacatgatagatgcgactccatatctcaagaagcggattttctgtggtggtttccgatagagactttatttgtcgatcaaagtaaaagaatgtacgatacttttcacgatcattccctgatttgtctaccatcagatcaaggataagatctatacgagttggcatttgatctccatcaatattggacaaaaagccccaaaatgatggattttgtagttcttgctcaatcatgtcccactggagtgagatttcctcctgtcgtcctgacatcttgtctcgcacactgtctttaagaaacaaggctttgacaagttccgagcttgtcagtggaatttttccaatgtttagacgctcaaatagctcaataccattctcagcagaatccacttcgtaccaaatgacgtttactgatgatatgaaatattcattgagtttggtcaggtaagctgccatttctcgacgctcaccctgtgtcttttctgtaaaatattgctctatatattcgtatgcagatgcgataaaataataatctatattcagctctctaagcgaaagatcaatattaccaagaaagtttgctgattctttacgagtttcatactctaacttaaagctaggttcatatagatctcccagttttgcttccatatacttgcagatgaggtatatggttgtaagacgttgctgcccgtcaatgagctcgaacctctcattgcttttctttacaacaattggttgtaagcaatatggctttcccgcactttcataaatgtcatcgagaaggagttttatttcctccgaggtccatctataaccccgttgataatcggggaggtagaaaaggcccttgatcttccctacattttttgtatcaagaataatgtttgacatattgtagtatcttaatataattttttatacaatgtaatatcgtatgctgactgattttcgctagtttgtatttaaaaggtggagactttacgaagttacttgttttttcgctaagaaccgatgttttaatgttttttatcgtttctcttcgaacagagggagaaagggtaaaaactgccttctagggcttcgatagatcttgttcacaaagatagggtatgtcggagttcgttttgcccaaaagggtagtaaaatcgaggatagattcacaggtattttctggttcccatgcgagtgttatgtgttctattcggagttgtattttgttcgatctttacactcggttactctacgttttgcagccaaaagaaaaatgattgaagttatttcatcatagtgcagccatctcttctcccttattttgactttactttattgaacgtatataggaatacggggataaagtaaagttggttttcatttgaatagcaaactaatcttgaatatatgttgtaaggtaatttttgtagaatagacatttaattcgcttggaaaaatgtcgtgtaatggggatgattcgtttgaaaaagtgtagagcctttatactgctgtgtcttctagtcttgcgattttgtctgcaatatatcattaaatagataaaaagtaatattttcatattatatgataagttgattatgacaaagaatacaatggggattaagttgcctcgaaaattggagcagaagatgtcggttgtgggagagcagataaaactggctcgatagcggaggaatttgagtgtggctcagatggcggaacgggcacttgttccccgttgactgtgttccgaatagagaaaggcgcaccgacggtagcaatcggaatatacttgcgagtgctgtatgctctgcagcttgatgatgatattctgtggctggtcaaagaagataaattgggaaaagctttgcagaatttgagtttgaagacaagggaacgtgcttcgaagaaagagtaagcgatgaagacgctatatgtatatgccgattttgattggatcgaagaaacagaactcgttggtgagttaggctatgaatctcttcgtagctcggattgctattgttttactctcaatgatggatgttttgaaaaaaacacggagatttgtttctgagcgatgatctgaataattatcagggacagcaatatacgcaatcggagaaagatatatttggatgtttctcggatgctttgccggatcattggggggcgaacgttgttgctgcgacgtgagcagattgtagcgatggaggagaagcgaccggtacgaagactgtttcctttcgactatttgataggtatcgatgacttttcccgaatgggggctttctattgtagaaatgattttccgttcggtacgaagctcggctaaatcaaggaatgcggtttttcttccgtaagagagcctttgggaactatttcgtaggaataggctttctcaaaggcttggtgtccggcatctgtcataagtcctcggtcttcaagattgatacaacgttctttgtttaactcagtccaatgacttcctttgcgatgaggtgaaagccgctgtgcaaggcatccgtctggcaatttctttagagttgaatcaatccacccgaagcacaatgcttcttcaacaacttcaatgtatggaatacattcgtatgtgggctgtttagagcgtgaagttacaacccaacacgatttcacccgattatggttgaccttcagccattctctcaactcgatgcggtctgtgaagtctagtagattgataatttccatatttgcctccaactgatatgttattaatccaactgttttctataaactgagtccaatgtatttccttctttatctttccataccaaccagccgttgttgctgctaccaatacagaaatctgcggcagtactgggacttgaaaaagttttatctgatgtcaataccaatattccgttctcagtagaagtgtaatcttgaagcatcttttctcgtttttctttccagttgaaagacggaaccattgttttggcaacagtacttccttttaggactgtgaatccatcggaactgtagaaaccttttgcattgcatcctctacctttggtgtagaatagatgttcttctttgggttgtgatacttcaaaaatattgcaaccgataaatgatgccaaaaacttcacatcttcgaaaaattcattcattgagtcctgttgatgctccggtaggttaggggctttaggaatttgtttattatcgcttaaaacaaaagcgtttgctttcttggcttcggctatagctttatgttctaggtattgcacatcaactttagtcatatcggcgtctttcgatacaaatatgagtgctttttgccaaaacgattttttgctatcgtggtcttttacacgttctttaaagttctccgtttcacctatatacgcctgcggcttggttgattcatcttcccccagcaatatatagaatgcaggtttttgtaacttctcttgtgtattcaaataagagagattagaacgtggtacgacaaacatttggcaaattttgttgctaatgaatgcgtattgagttccttttgggtctccatcaatgagatatgttgttactgtctttcccataaatatgtctaaattcaattactttgaggtataactcatttaagaactgacttttcttaatgcaaatatacactattatcgaatataattccctatatttgtctaataaaatcatatcaagtaatgaaactgaatagaataaagactgttttatccgaaaaaggtatttctcaaacgtggttagctaaacagctagataagagtttcagtatggtcaatgcctatgcctgtaatcggattcagcctaatttggaaaccttgcaacggattgcggagatattacaagttgatttgaaggatttgataactgataaaaaagaaaggttacaataaattatttaatacggttaggaggttctggttccttttgtaacttgttgcagatgtgcctatgaacttctgataatatatattatcaagaacatgactcctgaagaaaaagcaagaataaagatagaccagtggtttgccgatgctggttggaaagtagtcaacagggaggattatgaacctacttgtacggctgtagccataagagaaggtttattgaaaggaaatcttgaggcagattatttccttttcattaatggaaaagcagtaggggtacttgaagctaagcgtgaagaaacagacgcttttgcctccaaagtatgcgagcaagcagccttatacgcaagaagtgttccgaatatctatcaggcatatcaaaagccattgccttttatcttcacctcgaatggtaaggaactatattgctgtgattttcgtgaacaagatttttgtttcaagcagatcatgaatatccctacaccacatgaattggtaaagaggctgggaattgaagatgcatttgccggactccctacattgaaaaagaaagggctgcgtgattgccaatatgaggcggtaacagaacttgaaaagagtttccgcagtggacaaaatcgggcattgatggttcttgctaccggagctggcaaaacatatgctgcttgtcttgctacctaccggatgctttcttatacaccaatgcgtagagtgttgtttcttgtagaccgaaataatcttggaaaacaagtagaaggagaatttgggactttccgtctgacagagaacggggatgctttcaatactatctttacggtcaatcgccttcgctcgtcttctattccttctgatagcaatgtcgttatttctacaatacaacgtctattctcattcttgaaaggagaaactattgaggataatgatgatgacgagaacgaacctatagaggaagtaaccttgcctcctaatcccaacttaccgcacgactattttgatatgattatcatagacgagtgccatcgctccatttatgggaactggtgcaaggtgctggagtatttcgatacggcaagattggttggtctgaccgcaactcctatccctgagacaatggcattcttcaataataactgcattgttaactatacattggaaaagagtattgttgatggcgtgaatgtggattgtcgggtatatagaataaaaacgcaagtcacagaaacgggtggggctatattagagggtgagaaatttaaagaagaaacaagatatacaggtgaggttaagattgtaagtagtaaggaaaccaaaatctatacaaataaagaacttaatcggagtattatcaatccggcacagataaagttagtcctttcgacctatcgggatgtggtttatacagagttgtttaatgacccgcaacgtgaaccaaatatggactatttgcccaaaacattgatttttgctctcaatgaagctcacgctacaaatatcgtacaaatagctaaagaggtgtttggacggactgatggccgctttgttcagaaaattacctattcggcaggcgacagtaacgaactgatacgccaattccgtaacgacaaggatttccgtattgcagtgacctgcacattagttgccacaggaacagacgtaaagccgctggaagtggtgatgttcatgcgtgatgtggaatcattacctttgtatattcagatgaaagggcgtggagtgcgtactattggtgatgagcaacttcgcaatgttacccctaacgcattcagtaaggattgtttttatttggttgatgcggtaggtgtgacggaacatgtgcaaacagtggcacctatagatgatggtcctataacaaagacgattactctaaaggagctgttagaacgtatgagtcatggctatattccagacgagtatctcaaacggcttgcggcaacgcttgctcgaatatacaacaaggcggatgattcgcaacggaaagagtttgtccgtttgtctcatgatgacatgaaggagctttctgtcagaatatacgatgcgttggagaaaggcattcttccactgtttgtaagcactgatgagcctaacaatgaacgtaaggggctagtcgctccgcttgccaatcatgcggatgctcggaaattccttcttatacttgcagccggattcgtcaatacattgatgccgggtgaagatacgcttatctccaagggattttccattgaggaagcaaaaagtacgatagaagctttcgaggaattttgcaaagaacgcagcgatgaaatagaagcactacgcattatatataataatgaaggaacacctatcacctattctatgttgaaggatttggagaacaaactcaaaatggcaaacaaccatttcacttccaaacaactttggaactcttatgccatagttaatcttaaagcggtaaggcgttccacaaccaaagaagaaagcgatgcattgaccaatatcatacaacttgtgcgctttgctttccaccaaatcgaacgattggatagtgtagttactacctctaaacagtttttcaatctttggttaggacaaacccagcgtgaaataactgacaaacagcgagaggttatcagtcgtattgtggattacatcgcttctaacggagcttgtactatcagagatattcgtgaagatgatgctacccatgcagcccaaatgattagagcgtttggcaatatgcagaaggcagacgaggcacttcattccctttacacatttgtagttttaagaaaagcagcataaagaaatggcaacaaataatacaacagagcaatcgctcaccaaaaaagtatggaatctggcaaccactcttgccggacaaggaattggattcactgattatattacccaactgacctatcttttattcttgaagatggatgccgaaaatgtagaaatgtttggagaagagtcggctattccaactggttatcagtgggcagatttgatagtacttgatggcttggatttggtaaaacaatatgaagagacccttaaattgcttagtgagcaggataatctgataggtacgatttatacgaaggcgcaaaacaagatagacaagcctgtttatctgaaaaaggtcatcaccatgattgatgaggagcaatggcttattatggacggtgatgtgaaaggagctatctacgaaagcattcttgaaaagaatggacaagacaagaaaagcggggcaggacagtattttactcctcgtccacttattcaggcaatggtagattgtatcaatccgcaaatgggggaaacggtttgtgacccggcttgtggaacgggtggattcttgcttacagcttacgattatatgaaaggtcagtcagcaagtaaagaaaaacgtgatttcttgcgtgacaaagctttgcatggtgtggataatacgcctttagtggtgacgcttgcttccatgaatctttatttgcatggtattggtacagaccgtagtccgattgtttgtgaggattctttggaaaaagaaccgtcaactcttgtagatgtgattcttgccaatcctccttttggaactcgtccggctggatcggtggatattaaccgcccggatttttatgtagagaccaagaataaccagttaaatttcctccagcacatgatgcttatgctcaaaacgggaggacgtgcagcagttgtacttcctgataatgttctctttgaggctggagcaggtgagactattcgtaaacgcttattgcaggattttaatttgcatactatattgcgtttacctacaggtattttctatgcccaaggcgtaaaagccaacgtgttgtttttcagcaaaggacaaccgaccaaggaaatatggttttacgactaccgtacagatataaagcatacgcttgccaccaataaactggaacggcatcatttggatgattttgtttcttgctataataatcgagtagagacatacgatgcagaaaataatccgcaaggtcgttggcgtaaataccctgtagatgaaattattgccagagacaaaataagtcttgacattacttggataaagcaaggtggtgaggtggacaaccgttcattggcagaattgatggctgatataaaggataaaagccaaacgataagtgctgctgtggttgaacttgaaaagctacttgcgaatattgaagaaaattgagttatgggaaaagagattatcacaaatgataaagatataaacgacctgttcttgaaggttgttgaccttgtcacgcaggcaagggaacgtgtggcaacagccgtcaatatagctgaggtttatactaagttccatatcggacaatatatagtagaatatgagcaaaagggggagacaagagccgaatatggaaaggcggtgctgaaagaactctccaaacgtctgactgataggttgggagacggatggtcatattcaacgcttaagaatatacggcagttttatattgttttttctaaagggctaaccagtggttgtccaaagccgagtcaaaaggctaaccagtggttagccgattatccgaagtcagaggaatgtatttctgagccgacattcgctctctcatggtctcattatcttatactgatgagggtggaaaatccggatgcccgcagtttctatgaaatagaatgtacccaacaacaatggtctaaaagacaactcagccgtcaagtaggaagctgtctttatgagagattggctttgagccgtaacaaagatgaagtaatgcggctggctaaggaaggacaatctattgggaaaccatcagacattatcaagaatcccatcacattagagtttcttggtctaaaacccgatgcagtttattcagagtctaaattagagaatgccattatcaacaagatgcagcaattcctattagaacttggcaaaggatttctatttgaagcaaggcagaaaaggttcacatttgatgagcagcatttctttgttgacttggtgttttacaatcgtttgctacaatgctatgtgcttatagatttgaagatagacaaactaactcaccaagaccttgggcagatgcagatgtatgtcaactattacgaccgctatgtcaaacaagactttgaaaagccgacaattggtattctactgtgtaaggagaagaacgatgcactagtggaacttaccttgcctaaggatgctaacatctatgcttctgcttatcaactctatctccccaacaaggctttattgcaagctaaggtgaaggaatggattgaagagtttgaagaaaatgaggaattaaagaaactggaagaacatgaatagtaattgtgcagccaaaactgcacaattacaaacagaaatataacgatggatacaaaagcgttacgtcaaaagatactcgaccttgcgatacatggaaaacttgtaccccaagaccccaacgatgaaccagcatcagttctgctcgaacgaatcaaggctgaaaaagaacgactgataaaagaaggcaaaatcaagcggagcaagaagtctgcaaagacttccgatacgccccattatgagaacgtgccgtttgaggtgccggaatcatgggtgtggacaacgattgaagaaatatgctcaaagataggttctggtagcacaccaaggggaagtaactattctgcgaacgggattccatttttccgctcgcaaaatgtatataatgacagacttgtttatgatgacatcaagtatatttccgaagaagttcatcagaagatgaaaggcacggaagtgcttgctaacgacttgttgctgaatattactggtggttcattgggaagatgcgccgtagttcctgctgattttaattgtggtaatgtcagtcaacacgtttgtattatgcgttctgttttagttgaacctgaatattttcatatgttagttttatcttcatacttcgctaaatctatgaaaattacgggtagtggtcgtgaaggtttgccaaaatacaatttagaacagatggggtttcctttgccacctttaacagagcaacaacgcatagttgccgagattgaacattggtttgctttaattgaccaaatagaacaaggcaaagccgacttacagaccatcatcaaacaaactaaaagcaaaattcttgatcttgctattcatggcaagttggtaccacaagatccgaatgacgaacctgccatagaactcttaaagcgcataaatcccgactttacaccttgtgataacgggcattatacgcagttacctgatggatggtgttatgcaacgataaaagaggtgttcattatcaaccctaaaaataaggctgatgatgatgttgaagtggggtttgttccgatggcaaatattactgatggttacaataacacttttaaatacgagacgaaacaatggggtaaaattaaaactggttttactcatttcgcaaatggagacattgcagttgcgaaaatatctccttgtttggagaataggaaatcggtagttctaaaaggattaccaaacggtattggcgtaggaacaacagagcttcatgtgtttagacctctatttcttgatgtccaatatgggctttacttcttcaaatcagattatttcataagccaatgtgtaggctcttttaatggagttgttgggcaacaaagagtaagtaaaaatatcatcgaaaatatgattattgccattcctccaataaatgagcaaaaacggattgcttgtgccgttcataaaatatttgctaaattggatatgataatggagagtttataaactccccattatcatatctaaagaggtgaaaattgtttctattctgtcaattattcgcttttgttctgaaagtggaggtaagtgtataggcattgataaaaatttatcaagaatcagattgcgcaaccccgtagtttgagtttgcatcaatctcatatctcctttctgatattttgccagaatataatagtataggaatttacttaatactatgtcgttattccttgttcttaatgccattgtaaaattactgaatgaaaaaacaccacttttgccctcatagagaattgttcttccaacaggattattatcactaccacctgatttttctacaatcaaatcgccattttccaaatgacgtttagcaaaggttcgttgttcaacatcaatgtactctatatttgaataatctaacttaaagtccttagtgaaatttgcattgcgtataacccccacattaacaaatggttctttcttccctttccacaatccattgatgttttcgcataaatctttgagtgtaacaacgcaccatccatcaggtaactgcgtataatgcccgttatcacaaggtgtaaagtcgggatttatgcgctttaagagttctatggcaggttcgtcattcggatcttgtggtaccaacttgccatgaatagcaagatcaagaattttgcttttagtttgtttgatgatggtctgtaagtcggctttgccttgttctatttggtcaattaaagcaaaccaatgttcaatctcggcaactatgcgttgttgctctgttaaaggtggcaaaggaaaccccatctgttctaaattgtattttggcaaaccttcacgaccactacccgtaattttcatagatttagcgaagtatgaagataaaactaacacatgaaaatattcaggttcaactaaaacagaacgcataatacaaacgtgttgactgacattaccacaattaaaatcagcaggaactacggcgcatcttcccaatgaaccaccagtaatattcagcaacaagtcgttagcaagcacttccgtgcctttcatcttctgatgaacttcttcggaaatatacttgatgtcatcataaacaagtctgtcattatatacattttgcgagcggaaaaatgaaatcccgttcgcagaatagttacttccccttggtgtgctaccagaacctatctttgagcatatttcttcaatcgttgtccacacccatgattccggcacctcaaacggcacgttctcataatggggcgtatcggaaggaaaaaaggagagaaaaaatcctctccttaactctaaaccatgtattagacatttaagtttttcatcggcaatccataattgttttggttgaaaatttatatgcagcatattcacattcatactaatcagccttcttcattctaatggtacaagttacatttgataaatagaataagaaacaaagcacttattctgcatttatccgataaataaccatcggaaacaatgctgtcattgcagcaggtttgatcgtgacaagagaggttccggcaaatacggttgtgggcggtgttcctgtcaaacatatccgtaatatcaaggaataaagaaaggagaaaacaatagaaagttataagcaaatatgccctcatgctctcattatgcatataatccattgataatgagtgttgaatgaatgatggtagcatatttttgaagaaacaatttgccctcatgctctcactgtttaattatactgattactatataatgtgtttatattcaatgtgatatagctgaattcgtttcaaaatcactcaggtgagaaaagagtctattttgccgttttaggtgaagaaaagtggcataatgcctacaagatctcttttatatacacgaatcttatcatattttgctaggagaaacaacggtaactactacattttagggagttcttgatagtttatatagagatcattatatgataatcgggcattcatattgcagttctttactattataaattgcttaatcacagttgtgattagagttaatcactatcgtgattaattttagtcacaaaggtgattaaacttagtcacagttgtggttaagtaatttcaaataatagaaaaaacaaatagcaaagtacgatgagtagaacttatcagcatgaaaatgtaatcggatgcttataaaatagagtacactgtgatgaaaaagctcaaaatgcgatgattgataaacttttgaattaagactttgtatgtgtttatattgttgattatcagatagatatactctttttgtttgttctgtagaatgagggcatgagggcaaagatactttttgaaatatgctatcatcattcattcagtatttcattatcaatatgttaacttcttagtgagagcatgagggtatatttgcttataactttctattaatattggtgttatgttgagtcgatttattgtgaaatacagaagtgtttttaatgcttgttgtagcaattattaaaaataatcgctaagaaacgtttttcctatttaagaaattattatatttgtaccgactattctactatggcgtagtagaacgttacatattttaagaagcgttattgaaattatcttctatcgtcaaacttcgcaactttgaactgtacctgaagatgataacaacaacgctcacgtctgtgttatatacctgccattactgtggcatctatatatctaatggcgtgggtggctgttgtttatctaggtacaaggcaatgcgaaggcccgacgataagataaacaagatacagccctcacgcttttttattgttaacagccgaacagaggagggggagttaggcaaagtcttttgacaagatagactgatctaacatttacagacgtatgaaaacaacactgcaagcgggaatgcgtatccttatttcccgttatctgtcaagtcgaggttgcggagacacagtatatgtcaccggaccgccaggaatcttctgcccacagacggcaattatagcatctttctataaaaaatattctatggtatataattggggcgcataatgtctgaaataaagtctttgaaaaattaaaatcaaaagttattgtccttaattccgcaacactattacaaatataactttttaagtacctgagcaacaaaaagttgctcaggaatttgccatgtcagatttttcacctatcttagtgttgcaaatcaaaatatgtatcaaacccgacagacatggcaaaggtagcaattaaatccgagaaactcactccttttggaggaatattttcaataatggagcaatttgactccagactctcatctgtaatcgactcaaccctcggtatgagatgcaggctgtatggttatcaatacagcgaaatcatccgttcgcttatgagcgtttatttttgtggcggctcatgcatcgaggatgtcaccactcatctgatgtaccacctttcgcttcatccgacacttcgcacatgcagtgccgacacgattcttagagccataaaggaactgacccaggataacatttcctacacatccgacactggcaagacctacgacttcaacacggcagacaagctgaatacactgctcctcaattgcctattgtccacagggcagctgaaagagggcgaggggtatgacgttgacttcgaccaccagttcatagaggctgagaagtttgatgcgaagcctacatacaagaagttccttggttatcgccctggcgtggcggttattggcaacttgattgtcggcattgagaacagcgacggcaacacaaatgtccgtttccaccagaaggacacgctgaagaggttctttgaaaggtttgaacaaaacaagcttattatcaaccgtttcagagctgattgcggctcgtgttctgaagagatagtggaagagattgctaaacactgcaagaccttctatatccgtgctaaccgatgcagttcgctctacaatgacatctttgccctcagaggttggaagaaagtggaattgggcggcattgagtttgagctggcctccattctcatcgagaaatggaaagggaaggcataccgtcttgtgattcaaagacagaagcggatagacggcgaactcgacctgtgggaaggagaatacacctaccgctgcatccttacaaatgactacgagtcttccgagaaagagattgtcgaattctataacctccgtggagggaaggaacgcatcttcgatgatatgaataacggattcggctggaacaggcttccaaaatcctttatgggagaaaacacggtgtttcttctgcttatggcactcatacgcaacttctataaattcatcatggcgaggcttgacgtgaagaggttcggactcaaagcaacaagccgcatcaagacgtttgtctttaagttcatctctgtgccagccaaatgggtcaggacatcaaggaagtatgtgctgaatatctattcatgcaacaatgcttatgccaatgtgttccagaatgactttggataacaccgacaacttatagtcgtgattttgcgtattgcctcaagtcgcatggtggggtaaggggcatttatatgtctttatggtgacattcgatgcactgtgccccctttttactaacgatgcagattcttttcgcttctgtatcatattaggcgcgtagttgcggatttgaggattgtatgaaaattatggaaacaaacaatatggaaatgtatgaggctcctaaagtggaggtcatcgaagtagaagtggaaaaaggatttgcagtaagtggtggaacagaagactatgaccaacatccttggtaattgaaataaataattaaaaacatacacgtatgaaaaagatattgttcacatctttggctgttcttggattaggaataaccggttgttccaatgaagatttgggcgtggcgaaaagtggcgttgatgaagtatgtgccactatgggagatgctgaatcgcgtactgctatgaatggcaattctgtcgtttggagtacaggtgacgcgattggcatttttgtaacgaatggaagttcttctacttatactaacgctaactattcattatccaatggagccgggaccaagaatgcagagttctcaggagtactggaaggtgataatcctgtaaagaaagctgctttttatccttatggcagcgatgcttcttatgatggaagtaaaatatcattaacgttgaaggatacctataattataaggaaggagaaaacagcagtgctcttatggcttgccaaataaatgagagcacgcaggatgtcctggcatttaaaaatgcaggtgccttgatgagcgtaactgtcaataatatcccgacggactatacttgggcaaaattgacttctatgaccgttcaagaaaaaacgactgttccaaccattgctggaaatgcacaaatagcattcgccgaaggtatccctacattgacaaccacagaaacgtcaaattcctcatccataactataaattttactgctggcaatgacgtgaccagtaaaacattctatttcccgttgcctgtagccgagtatcctgccttggaactttccattggtaatggctctacaagccaggttttaaagacaaaagctttagatgctaaacgtaacgaacgttataccacaactataacgttggacgaagtatccggaagtgtaccgacaacagttgaaagtgtatcagcggtagccgatgctttagcaacaactaattcggtttctgtgactgatgtggctccaactgaagccagtcctacagtttcaataccgaaaaaaaatacaccggcagaaaatgtcagcatatcctttgaaaatatttctactactgctactgttgctataaaagaagcgagcactggcgctagtggtaattcagcacctgaaaacgtgttggtatctgtaccgcaattagatactgcgcctaaatttgagatagagctgccttcttctaccgtaactttggctgccaatggcgaaacagctacttatgatgaagtaacggcaactactgctgcaaatacattggttcttgataaagggattacggttaatacattgaaggtaaaagccggtaatgtaagagtgaagagtggtgccaaagtaacagccattattcgtgaaagcggtaacacttcaactgtcattatttataaagaagagggggctgaattacccaatctgtccggtaatgacgcatttgaagtagttgatgctgccgtagccgacttgcaaaatgtcgcaaaaaatggtggaacttatactcttgccacagacttgacgggagattttactatttccgcaacaaaggaagttatcatcaatttgaacggtcataaaattaccaacaaatctggtgatacatttaccgtaaacaaggatagtaaactgacaatcaacggaaatggtacagtggataatgtaagtcacgggaaagcttgtatctataataacggtacagtaattcttaatgacggaacctatattagaagtaaggaaaacggtcagaattcagaaagttcaggtggtaacagctattataatattctgaatcatggcgagatgacgattaatccaaatgtggagatatcgcaaaacgggtattattcttcgatgatagccaatgggtattatgattataccaatacgaatccgcgaaatggatatgtaagtggtaccaatcatcagaatccttcacttatcataaacggtggtacatttgccggaggtctcaataccattaaaaatgatgatggagcccagcttgtcatcaacgacggtacgttcaccaatatgtctcaggcaaccgtacagaatcatcatgtggctgaaatcaaaggaggtacattcaatacgactggttccgctcagtatgtggtggataatgaaggtcataatggtgcagccaatgacttgggacagatgactatcagtggtggtacactgaatggcaagatctatgtggttggtgcaggtgcatcgctggctgttaccggtggtactttttccgatccgtccgcacttttatacttaagcggtaatgctaacgtgaagatacgtttgaatggagacgctacttgtaatggctttaaaacgcaaagtggacaatctgtagaattggacttgaacaaccatgtgcttacacttgctaaaccgaccgttggctcggctggcacagaaacgaacagttgtcaattgttgaaaggttctaccgttactatgaaaaacggaacactggcaagtgataatgataaaattatgattcaaaactactgtaatttgacgttggatgctatgacagtgaaggggctaaatgccttatatgtattgagtaacaattgtggtaatattttgattagcaatactacgattaatgccggaactggtgcatatgcatttgatgtttgcggctattcaacctacactgacggagttaaagtaactgttaaaggtactagtattattaatggtaacgtggaattatcaaaaagtaccggaaacaccgaacctatggaattgaatattgagggtggtacttttaacggcaatttggttgttgattcatcgataacaaatgcttcctctatcattaacgtgactggtactccttcttttaaaggaaccggttgggatagttataaaaaataagagaattatttgctatcatgttattagtcatggcagaaagtgatttgtaataaaagaaggtcgtcctgtctcgaaaggtcgggcggctttctttttttaagattagaagattatgaaacttaatccccatttcaaactccgctccatagccggagaaacaataattgtgaaccaaggtgttcccgatactgatttgacccgtattatttcctttaatttttccgcttgcttactttggaaacgactttcgggaaaggatttcactttacaagaggcagccttggtgttggtggaatcttatcatattcctcaagagcaggccgaaagagatgtggtgatttgggcagatgcactaaaaaaatgttcagccttacttgattgatataacaatggatataatactcgataaaccggagcaaatgctatttgccttgctccgatccgcgttgaacagcacaaagccggttagtgaaatcctttttaccgatatatctcctgccctttggcaggcgtgttacaaactagcttgcactcagggagtgatggccttggcatgggacggaatacagaccctgccggcctgtttgcaacccccgaaggctttgaaattaaactgggcgatggcggtagagaactatgaaaaacgctaccggcggtactgccataccatagccgaactttcagctttttataaaatacatggcattaccacggtccagttgaaaggagtgggcctctccacctattatcccattccttcgcacagggaagggggagatatagacatcttcacttattcggcagaccattcccggaaaagtgatgccgaggccaaccggctggcagaccggttaatggaagaaaaaggaatagaggtagaccttgaacactccgaaaagcatagtatgttttactataaaggtattccgatagaaaatcataaaaccttcattaattcggaaacataccatatagcggtgaagatggataagctccttcaagaactgctacaacccgtatcggcggaattggacggaaaataccccattttcattccatcttccacttttaatactgtatttctcgcttttcatgccgcccagcattacgcacgcggcctggcgcttcatcatctttgcgactgggcttgcctgctgaatagatacggcctgcatattcctgaggaagtgacggatattcgttttagaaatatgatgctggcaatgactcacctttgtaatgattatttaggaacttccgttcctgtatatggaggagaagggttggcggaggaaatcttgcgggaaatcatccggccaccctatactaagtttgttccggcgaagaataaatggagcattctggtttataaaaccaaacgtatgctgcatactcatcgtgcgtgtaacagcgtgttgcgcatttcactgtgcaaatgggttggaatttctattctgttgcatctgcgttctccccataccatcttccaaacggaacgaaaataagtggtttatgttgaaaagaatctgccgtttgttgttgcctgatgaaaggaaaatggggataagggtggtttgtgccgtatttctttgcgcattacttgactttgccggactcgctgccctgttgcctgtcttgttttttctgttggatgacgggagggataaagatgccgccctgttattttgtctggtggcaatagtctttattttggtgaaaaacgctttggtagcggggctttcacgttttcaaaaccattttctgatgtctctttaccgtcggctcagcttttctctctttacttcttactatcaacggggattattgtttatacgcagcagggggagtatccggctgggctatgaggtaaactatatttgttatgctttttctttaaatcttctttcccccttgcttcgcatgacaggagaactgctgcttattttatgggtgacggcagctttgttggtttacgctccgttgacggtactgatgctgtatattgcctttctgccttttatgttgatttacggatgggggatcaggaaaccgatgcgccgttatggtgagcaggagcagcaggctcgtcgtgagcagtcccggctggtcacggaaacgatgaaagggtatgccgaattggaactgaatgcggcgtttcctttttttcagcaggcattcgccgagaggataaggaaaatcagtgagagccgtttgaaactggaaatgatacagcaccttcctttttgcctttccgaaatggcagttatatcgggactgaccttgctcaccgttttcggaacaggggatatcaaagcgttggtaggtgtctttgctgtggcggctttccggctgttacccgctttgcgcggcatcttaggtggttggacacaagtacagaatgcggtctattctctgcggattatagaggaagggttgggggataaggggatagaagcagtttctccatcatgggggcaggaagcgttttcttttcaaaaagagatacgggtagaacacctcacctatgcttatcctgaaagtaaagaggttctaaaggatttttgttgtactattcgtaaaggggaatatgtaggtatctgtggtgagagtggcgtgggtaagtctaccttgttttatctgcttttgggatttatcactccggataaaggcgctattcggatagatggcaggccgcttgccgatgtgccgaggcaggaatggcatcgcaaggtgggatatgtgcaacaggaagtgtttgtgctggatgggaccttggcggaaaatattgctttgggatgccgggttatagataaggaacgggtagcggagatagtgaggcaggtgagattggatgcttgggtggatgaattgccgcaaggaatggatactcctttgggtgaagggggaggaaggctttcgggaggtcagaaacaacgggtaggcatcgcccgtgctttgtataagaaagcggaggtgcttctactggatgaggctacttctgcattggataatgagactgaacgggctgtcaatgaaatgcttctcagtctgatgaaggagtgtagggggctgactattcttacgatagcccatcgggaaagctcattggcatattgtcatcgtgtaatcagattaaatggaaaagacaatggatcaaatttataaaataggtggccactgcttcgcattgccggacgaaaggttgatggaggtggtggatggtatcagcggtttcaagccttttatttggcaaccggatctggttttggtaaaagatgtatacgagggtgcttggttgccggattttactgtttgggagggaaacggttgggattttccggcttttcagagaaagtcctatgggttcggatatgaagatgtaaccggtactttcggtgtgagtggggatagttttttgttggaactggctccgcagggagaaccgtcgctttatctccggacgatgggtgaaactgggaaaggtatctgtttatatggtcattattctccccgtcttttaagatttgccttatggatggggtatggcctgatgacggtacggaaagatacggttgccttgcatggcagttgtattgtttataaggggaaagcggttctttttttaggtgaaagcggaaccggcaaaagtacccatactcgtttgtggagggaaaatatagcaggaagtaagttgctgaatgatgacagtcccattgtgcgttatgaagaggggggcgtgtgggtatatggcagcccgtggagtgggaagactccttgttataaggcggaatgttatccgttggccggatgtgtacgtttgtcacaagcaccgtataataagatacggagattgaacactttgcaggcttatgcagctttgcatccgtctgctcctcctgcatttgcatacgaggaggaattatacagtggggtttgtagtctgttggaaaagatggtttcatccattcctgtttatcatctggagtgtttgcccgatgcggaggcggtgaaattagtatgtcgtactttatatggagatgggtatgaagcggatagcgaatgaatgtttctttgcgtgggtggagtcggaaatcaaaagtggcaggagtgtgaagttccgggtgaaaggcaattccatgatgcctttactgagaaatgggaaggatgaagtggtggtggggccgtatgataaggaggagttgaaactttttgatgtcattctgttccggcagacagaccggtatgtattgcatcggattattcaaaaaagaggcagtcgttatttgatgcagggagatggcgtttgtcgtttttatgaggaatgtgaggacacggatatcatcggggtggtgagaagggtatgcagaccttccggaaagaagattgaaacagattccgcctgttggcggttggaaagccgtttgtggttgggacttggtggatgcagaggaatggtgttgcgtgtcctgaatagattgggttgttggctccttttttgacgaaagccgtcagcttggaaggaaatattattcataaagcaggtatttctctctcatctttttgtaggcttccagttcattctgccatcctgcacggatttcttcttcactggctcctttcgtgatttgttcccttacggtacggttccctatcaacaggtcgaaccattgtgggcgggtaaagaacttgtccgcttttccaaggtcttgataagcttgataataggtgatgatgtattttaaagagaatcctttcggggcggtgatatggcggagattattgccatagcagtattggtttttatacatcggattcttatcaaagccttccaaggcttccggtctgaaagaaaaggaggagatgcggatatccggtgaaccgattacttgaaaaggataaagagtacctctgcccacactgatggctgtaccttcaaacgggcagagtgaaggatataaggcaattgcttggtcgttgggcaggttgggagagggctttaccggaagcgaatagggttgtccgtgtttccaaccttctacggggataacggtcaacgcgcattttttgccattggataaccagccttcaccattgatcatttgagccaactcgcctacagtgcaaccgtgtaaaataggtatgggatgcatgcccacgaaacttttctgatttttctgtcgcacaggaccgtccacataatcgcaaggattgggacggtctgtgatgaccagttgtttccggttctcggcacaagcttccattatatactgcatggtgctgatataggtatagaaacgggcgcctacatcctgaatgtcaaacacaatcaggtctatatcctgtagctgtgccgcagccggctttttatttttaccgtaaagggacaggatgggtactcctgtacgggtatcttttccgttcttgatggtttctccggcatcggcgtcaccccggaagccgtgttcgggagcgaataccttttttatttgtatatgcgctgccagcagggtgtccaacagatgagtttctcctaccctggaggtttggtttacaaccaatgctacacgcttcccttttaatataggtaagaggtggtccatctgttcggctccggtaataactttttgcgcggtcacggcgttgaaagtaaacaagaggcagcataggaaaatgtattttgttttcatgatatgtggtgattattttgtaatattgcacaaaaataagaatttaattgagaatggacgcacttgctatcattaataaatattatcctgaagataatgaactgaaacatatcctgctgacgcatagccgttcggtggccgataaagcgttatggattgccggcaagcatccggaattgaatctggacaagcaatttttggaagaagcggcaatgctgcacgatatcggtatttttatgacagatgctgatggtatttgttgtttcggatcttattcttatatttgtcatggatatttgggggctgatctgatgcggaaagaaggattcccgcgccatgcgttggtctgtgagagacatacgggggcaggtatatctttgcaaagtattattgaccagcaattgcccgttcctcatcgggatatggttccggtatcactggaggaacaggttatctgctttgccgacaagtttttttcaaagacacatctggacaaggaaaaaagtgtggagaaggcgttaaagagtatttcacgttatggggaagatgggataatccgttttaaccattggtgcgaatgtttcttgtaagccttaaaaataaattaaatatccgctaaatagttcattattggcggataatgcttaattttgcccctcaaaagcgtaaatgatttgtgaatgacgccactaaaacgacatagatttataacattcctactactatttgcatgcctgttgctttctttaagtacgggtgctcaacgcagaaagcggaattctgcatccggcaatgattccctgaaagtagatagtactttggtagatacgttgtctattgatacggttgcacctaaaaagaagcagccgttggatgcgcctgttatttatgaagcaaatgactctatcgtattcactgagggcggatatgcccatctgtatggtgacggtaaggtgaactatgagaaaattgaattgacctctgctgtgattacaatgaacatggatagcagtacggtgtatgcccgtggtgttcccgactcggttggcgtggaaaaaggtactcctatctttaaagatggcgagactccgtacgagtcaaaaatcatgcgttataacttcaagtcgaagaaaggtttcatcaataatattgtaactcagcaaggtgaagggtatgtaaccagtgaagaatcaaagaaaggttccaatgatgagctttatctgcgtcacggacgatacactacgtgtgataatcacgaacatcctcacttttatctgaagctttctatggcgaaagtacgtcccaagaagaatgtagtatttggtcctgcccagttggtggtagaggatgtgccgttgcctcttgctattccttttggttttttcccgttcaatagcagttattcgtcaggattcattatgcctacatacggtgatgaaatgaatcgtggtttctatttacgtgatggtggatattattttgctatcagtgatcgtatggatttgaaagtgctgggtgagatttttacaaagggctcatggggactttccacgcagtccaattataataaaaggtacagatatagtggtaatttcaatgccagttatttggtaacgaagacaggtgagaagaatatgccggactatatggttacaaaagacttcagaattgcatggagccacagacaggatgccaaggccagtcccaacagttctttttcggctaatgtgaactttgcaaccagtagttatgaccagcgtaacctgagtagtttgtataatccgcagcaatattcaaataataccaagacgtctagtgtgagttattcgcgtaactttcccgagataggattgaatttgtccagtacattcaatatttctcagaatacacgggactcttctatcagcgtgacgttgccggacttgaatatttcattgaaccgtatttatccgttcaagcgtaagaaggcggtaggtgatgaacgttggtacgaaaaaatctcacttcagtataccggtcaggtgacgaactctattaataccaaggataatctgattctgaagcaaggattgaataaatggaccaatggtatgcagcacaaaattcctatcagtgctacatttaccttattcaaatatatcaatatcgtgccttcttttaactataccgagcgttggtatatgcgcaaggtagagcagagttatgatccgtcggcacctaataatgtgcggagagatacaatcaacggtttcaatcgtgtgtataactatgatttgagtttgcaggtgaataccaagatgtatggtttctacaaaccgtggaagaaattgtttggtgacaagattgaaatgatccgtcacgtctttactccttcggttagcatgagttatgcgccggatttcagtacgtctaggtatggatatgtgggaacgtatacttatactgatacggatggagaggtacgtactcagacttataatccatatgaaggtttgccttactccttctcacccagtggtaaatccgagaattttactttctctatagacaataatgtggaaatgaaagtgaaatccgatgcggatactaccggagtgaagaaaatcagcttgattgaccagttgggggccagcatttcttataatgcagcagctaaagagaagccgtggggaaacttgagtatgaatctgcgtttgaaactgaccaagagctatacttttaatatgaacgcccagtttgctacttatgcttatgagtttgataaagatggtaaggtagtggaaggcaatcgtacagaatggtcatacggacgtttcggtcgttttcaggggtatagcggttctttctcgtatacattgaataatgattcgtggaaaaaatggtttggcccgaaagatgaaaaggacagtaaaggggataaagacaagaagaatgaaaatctggatgagtacagtgatgatgacaatgaaaacaaggaggaagaagataattccggcttgagaaagacagagaaggcggctatagatccggatggctatatggctttcaagatgccatggtcattgagtctgagttatagttatagtattcgtgaggacagaagtaagcagattaatattaagacgatgcgttatccttattcaataacccattcattgaatgtttccggtaatgtgaaattgggtagccgctggaatgtgaattattcttcaggatatgactttaatacgaaagagatgtcaatgacaacggtcaatatcagccgtgacctgcactgtttcaatatgagttgtggcttggtatttggtccctttacttcctataacttcagtattcgtgctaactccagtatgttgaccgatgctttgaaatgggaccagcgaagcaatacgggtagtgcagtgaattggtactaggagaaactgagaataaaaaataagaaatggttgcatgttgttatcggcaaccatttctcattttttttattctggtctttaatttatgtctaccactcaatcggtgtttgcccgtgtgcttgcaagtattcgttggtgcggctgaagtgcttgttgccaaagaaaccattataggctgacaggggtgacggatgtgcggaagccagtaccaggtgtttgttgcggtctatgaaggctccttttttctgtgcataagatccccataagatgaatacaatattttcacgttgttctgccagtatacggatggcggcatctgtaaattcctcccagccccgtcgttgatgagagcctgcttgatgggcacggactgtcagtgtggcattgagtaataatactccttgattcgcccagcgggtcagattgcctgaagtggggatgggagcacccaaatcgctttgtatttctttgaaaatattttgtagggaagggggaaaaggtactccgtcattaacggaaaagcagagtccgtgcgcctggccgggaccatggtaggggtcttggccgataatgacgactttcactttattaaacgggcacagattgaaggcgttgaatataaatctacccggtgggtaaatagtggtagtctggtattcgcttcttacaaactctgtgagtttgataaagtaatctttttcaaattcgggtgccagatgttgtttccagctttcttctatttgtacgttcataggctttctttttattaaaaatgtgcgttaaagataggggttatttgtaaaaatgacaaataaaaagaggatgacttttgtatcaccctcttcttcgattgctgatagattataatcaaataagttgcatacccaattgagcgcattcttttctcatatcttcgggccatatactggcttggatttcacctatatgggctttctgtaaataaagcatacagagtcgtgattgtcctataccaccgccgatacataaaggcagagtttcatccaacaagcgtttgtggaagtacaattctttacgcttttcctgtccgctgagtgtcagttggcggagtaacgcttctttgtctacacggatacccatagaggaaagctcaacagaacggtctaatattttatcccaaaccaacaagtcaccattcaggccggggagtccggtttccggattaattgtggtgtagtcatcatagtcaggtgcacgcagatcatgttctttaccgtcactcagtttacatcctatacctataataaatacagcaccatatttttgcgcaatagcatgttcgcgttctttcggagttttgtcgggatacatttggcaaagctcttctgagtggatgaaatgaatgtcatgtggcaggaagggtttgatctgcggatacatttcgcataccatatattctgtgcggcgcatggctgcataaatacgggttactatttgtttcaggaaatcaactgtgcgttgttctttggtaattacacgctcccagtcccactggtctacatatagtgagtggagattacctaattcctcatcagcccggatggcgttcatgtcggtatagatgccataacccggttctatattgtaatcggccaaagtcagccttttccattttgccaatgaatggacaacttcggcctgtgcgtctcccaagtctttaatagggaaagataccggccgttcggttccgctcaagtcatcattgatacccattcccttcaatacaaatagcggggcggtgacacggcgcagacgtaattctgacgacaagttctgttgaaagaactcttttatttgcttaatgcctaactctgtttgttttaaatcaagcaaggctttatagttagctggtttaattaggtaactcattgtaaaatagatctaattgttttaattgcttgcaaatatagaaattatttgtgatattgttatatatttaggcaaaaatataatcaaattgattgttttgttcttaaattaatgtgcaaaatattattttgatagataaatatctcaaattattaggagaaagacaatatattttgtacttttgcacgtccaagtttcagacgcacccgtagttcaatggatagaataccggattccggttccgacgatatgagttcgattctcatcgggtgtacaattcagtaacctctttgcaaagaattgcaaggaggtttttcttgttatatcttctccgtatgaacttttttttcttttttgagttattcccttatgtaactttttaaaatatgccttaatatttagtttattctaaaaaacaaacactaataaaggatatagttccttttattccttgtatatactaaatatacgtgcatatattcgctgttgattttaaaattattttctttttgaggtgttttaaaactaacgcttaattaaacttttttatttaaacattaatttatcaaccaaatctgagattcatgaagaaagctctcttttttatcgtatgcctctgttttgcaataaacatgatggcgcaaacaaaaacgataacgggggtagtggtagatgccactggtgaacctgttatcggagcgagtgtcctggaggtggggacaacaaatggtacaataactgatgtcgatggtaactttactatccaagtgcctgtgggggcgaaactggatgtaagttatataggctacaaaacacaacaaattgttgtgggagtgccaaacatctacaaggttgttttaaaagaagatgcagaaatgctggatgaggtcgtggtgactggttatggaatgagtcagaaacgttcgttgatgacgaactctatttcgaagttggacgataaagtgttgcagaatgcggctatgagtaatgcggcccaatccttgcaggggactgtcagtgggctgcgtgtgacaaatacttcgggtaaaccgggtagttcgcccaatatcgttttgcgtggtggtgcttccataaacaagaatctggaaggtccgttggtcgtggtggatggccttgtgcgttccatggatgatatcaatccttcggatattgaatccatacaggtgttgaaagatgcggcttccacagctatttatggtgcccgtgccaataatggtgtgattctggtgacaaccaagaaaggggtggaaggcagaacacagattacttacaagttcaaaggcggtgtgaactttgcgcgtgaaggatataaatatctggatgccggtgactatttgtattatcaacgtttgggatggcagcgtaccaatggcggtacaagtatggagaaccagaaaggttttggagttaactccggagtggatctggctttcatgacagaggccaacaagcatttattgaatgaaggatggcaatttatggcggaccctacagatcctgataaaactttgatttttagaaatcatgccggtgaactgcatgacctgactttccgtaatgccgcgtttacccaagatcattatttgaatctgtcgggaggtaatgacaaaggaacattttcttcatctttgggatactattcagaagatggtcagattatttccaccaattatcagcgtgtgaacgggactatcaacggttcatacaagttgttgcccgttttgacagtgaatgccggtggtagtttttcatggtctaagatgcccgatttatggacttacgatctgaaaagcccttggaatggagaaacgggagagtatgagttgttctatcgtactatgagtatgtttcccacttggaacccgtggaatgaggatggaagtcctgctgccggatggagtaatcaggatggtaatccttattattggaaagataagctgactcgttctacgacgaaccgtaagacttcgtttaatattggttttgctttagaaattattccgcagcaattgtttctgaacggaaacagctctatgtattataccgattatcagtttgaattgttcgaaaagaagtatcagcagataggtcaggctcctaacaccaatcgtaatgcttcgcaaacaaatacaaaagtatttcaacaacaacatgcattgactttggaatataaaaaaggttttagcggacataatatcaatgctatgctaggtggcgagtattttgattatcaatatcagaacttggaggcgcgtgtctccggtgctcctacagatgatatacctactttgaatgcgggtactaatcgtacttatactacttccatcaagaccggttatcgtattctttccggttttgcccgtgttaattatgattataattatcgttatatggtgtcggtggtagcccgttatgacggtatctctaaactatctgacaatcgttggggattctttccgggtatatccgccggttggaatgtgcatgaggaagctttctttaaagattcaaagtttgcggaagtagtatccttgattaaaccgcgtatcagctatgggttgaacgggaatgtaaatggtattggtaactttgatgtatatggtaaatacggttcggtgggtgcttataatggtaatctgggttatttgaataccggagtggttaatagtaaattgcgttgggaaaagagtcatacgtttgaactgggtcttgatctgggctttttcaataatcgggttcacatgattatggactattataaccgtacgacttccgatttgctgactgatgtgaatttgccggaatatacgggattcccttcgttcaagacgaatctgggtactatcagtaaccgtggctttgaattggaagccaaggtgaatctgctgacaaagaaggactggtcatgggatgtcaccgctaatacttcgtttgtgaagaatatggtgaagaagctgccttttaatgggaatgcgaacaaccgtcaggggggtgagcagatatgggatccaaaatccaactcattggtttgggtaggcggtattcaggaaggaaaaagcttgggtgatatcattgcttataaacaagtgcgtatcttgcgtgactgggatgatgtgagaaaccatgccggtgattttgtggatgaagttgccaacctgtatgggccgaataaagctgccgaatatgcaggaaagccgggatggaagcctattgagcctggagatgtattgtgggatgacaaaaatggtgataacataataaactcatacgaccgtcaggtggtgggtaatatctatccgaaatggacaggtggtttctctaccacgctgaattataaaaactggtctttgtatggtcgttttgactatgcggtaggtcataccatttacaatgatttgaaagcaagaatcttggggcagtataacgggtcgttcaatttgattacggatgtcagaaattcgtggtctgaaaacaatacggaaactagtattcctaaattttattgggctgaccagaatgcgaaaaagaacattacccgttccaataatggtacaacgaatctgaacaataataactctactttctatgaaaagggggattatttgtgtctgcgtgaggtaaccttgagttataaattctcgaagaatcttataaataaggtgttcttgaccgatgcgtccgtgtatgttacgggacagaatttattctatattaccggatatgacggaacctctccggaaccggttatggatattcaggcaaatggtcgtggtggtatagacaatggacgttatcctacaccaagaaccgttttgtttggtttacaattgtcattttaatatgtaaaaaagagaaagtatgaacataaaaaaggtaatattggcttttgccgcatcggctatgttggccggtggatgtacttcgttggatatggacccggtgagcgatatcactgacttgaattactggaaaactccggaacagtttgattcatttgtttttggactgcatagtcgcttcagaagccattcgtggaatatgtttttattgggtgaggcaagaagtgatgtctttgggggaactccttttggtggagaagccacccaggggatggaacgttttccttataatacattgaatgtggagaatcccggaatcagcggatttggtgatttgtatcagaatattaaccagatgaatttgtttatcagcaggaccctccatacggatgttctgactgaaagtgctaagaactattatttaggacaggtatatggattgcgtgcctactatatgtatcagttataccgttcatggggagatgccgtgtttacggaagagcccagcttgggttttgaagtgggtaaattggcaaaggcggcgactccggctgccgaaatttttgagcaggtaaaaaaagatatagaatcttcattaagttattttgggcctgattataccataaaggaaaaaaaatcgctgtggtcaaaggctgccacattgatgctgaaagcggatgtatatttgtggagtgcccatcgtgacgggggagaaggagatgcccggacagcaaagaatgcgttggttgacatacagaataatatcagtcgtagcaatctggacttgatggatacttaccagggagtgtttgcttatgataataaaggtaataaagagattatctttaccattcataatgagttgtttgaatacaacctgtggaatggaaataatgatttgtttccgcaggcggattatttagggaaattctataatgcggatggtactttgataaatacgtctgtcgagaataatttcggtatcatgcgcctgatggtgaaattggaaaacttcaagaaatttctgccgggagacactcgtcgtgacgttacattgaaagatgtatataataaggtggaaaatggcgagttggaattggtggggctgtatccgcataagtattggggagttatgaatggaagtacacgggtgagatgtgatgattatcctatttatagatattcggatttgctattgatgctggctgaggcgaaagtgcttttgggtgaggatccggctacagagataaaccgggtgcgtcagcgtgcgtttggtgatgcgtatgatgcttcaacagtgggattccccaatcaggaaattgataagtatccggcggatgctgttctgcaggaacgtttgtttgaatttatgctggaaggaaaacgatggtatgacttgcggcgttttggcgattcgtacgtacttgactatactccggcggagtctgcccgtctgctttggcctatcaaccaaggagctcttactaataatccattgttgaaacagacggttggttattaaatttttgtctgataagtatccttaattgcataaaaagacggtattctttatgaaattaataaagaaaccgtctttttattttctaatttcaataaaaacttttatttttacacccgtaaaattataaatattatgagaaaccctagcttattactgctaattgttgtttttatattagcacccttcaagttaagtgcggcggcagatacggttgctgtccgcgaaacccggattcctgtgttgattgaaaggcaggataatgagttgtttcatttacgtatagaggctgctcaaagtcagatgctgaatgaagtgaagttggacttcggcaaagacgtgaatttaaatgaaattgaatctgtgaaactttattatggtggaactgaaagcgtggagaggagaggaaagacttattttgctccggtagattatatatctaataatactccgggaaaaacattggctgccaatacttcttattccgttttgaagtcggaagtaaaggccccgaagcgcgaggttatattgaaagctgaccaaaaattgtttccgggagtgaattatttttggattagcctgcaaatgaagcctattgcttctatcttgtctaaagtgtcggcaaaagtggtggaagctaagattgacggacagattgctcctttgaagatagttcgtaaggcggatacccattatatgggggtaggcgtgcgccatgccggtgatgacggggctgctgcctatcgtattcccgggttggtcacttcaaataaaggaaccttgttgggggtatatgatgtacgctataataatagtgcggatttacaggagtatgtggaaataggtctgagcagaagtacggacggagggcagacttgggagaaaatgcgcattccgatggcatttggtgaatatgatggtctgcctaaagcacagaatggagtaggtgatcctgccattttagttgataaaaagacaggaactatctggattgttgctgtctggacacatggtatggggaatggtcgtgcgtggtggaattcacaaacaggtatggaccgtaatcatacagcgcaattaatgatggtgaaaagtgatgatgatggtaaaacctggtcggagcctatgaatataacagaacaggtgaaagatccgtcatggtatttcttgctgcaaggtcccggtagaggtatctctatggaagatggaacattggtctttgccagccagtatattggcagtgatcgtattcctaatgccggtgttatatacagtaaggatcatggaaagacatggaatatcagcacattggcacgcactaatactactgaatctcaggtagtggaagtggaaccgggagtgctgatgctgaatatgcgtgataatcgtggcggcagtcgtgccgtttctacaactacagatttaggtaaaacgtggaaagaacatgaatcttcacgtacagccttacaggaaccggtttgtatggccagtttgattagtgttaaagctaaagagaatgtattaggtaaagacattcttttgttctctaatccgaatgataccaagaaccgtcatagcattacaatcaaagcaagtctggatggcggggtgacttggttgcccgagaatcaattgttgttggatgccggttggggttggggatatagctgcttaactatgattgacaaggaaacagtagggattttatatgaaagcagtgtggcccacatgactttccaagcgataaaattgaaagatattgtaaagaccaaataaataatgaaacgctggttttctagttttattggtatgatactggtttgtgctataaccatagcacaaaccagtatctcattacttcctaaacctcagttgtgtaaggatacggggaagaactttactatgggaaaggtgaaactttctactccggtattgaggccggagtgggaagtttttatcatgaatgcgggtggtgagattgttgaacactcatcatcggtgattgaagtggaactggttccgtctattgatgaagctaggttaaaccgggatgaagcctatcgtctttctgtttcaaacaagcgaataaagatagaggctgtaacagaacagggtgtgtattgggctatgcagacacttcggcaattggagcagaaaaaagggaaaagaagctctgttgccggatgtgagattgtagactggccggcattcaggatacgcggatttatgcaggatgtgggacgcagttatatttcaatggaagaattgaaaagagagatagagattttatcccggtttaagattaatgtatttcattggcatcttacggaaaaccaggcatggagattggaaagtaaaatttttcctatgctgaatgatagtgtgaatactatccgtatgccgggtaaatattatacgctggaagaggcacgcgatttggtggatttttgtaagaaacatcaggtgttgttgattcctgagatagatatgccagggcatagtgctgcctttgtgcgtgctttccgccatgatatgcaaagtccggaagggatgaaaatattgaaactgttactggatgaggtgtgtgagacatttgatgtgccttatttacatataggtacagatgaggtggagtttaccaatccgcattttgtacccgaaatggtggcgtatgtacgctcaaaagggaaaaaagtaatatcctggaatccgggctggcactataaaccgggggaaatagacatgacacatttgtggagttaccgtggaaaggcgcaaccgggtattcctgctatcgattccaaatttcattatctgaatcattttgatgttttcggtgatattgtagctttgtataacagccgtatttatgatcaggcagaaggcagtgaggacgttgcgggaactatattggctttgtggcacgatcgtttgattgacaatgagtggaatctggttattgaaaatggcttgtaccccaatatgcttgctattgccgagcgtgcctggagagggggaggtacggaatattttgacggactgggtacgatacttccctccgaagacacggaagcatttaaagaattcgctgattttgaaaagcgtatgttgtggcataaggagcatacgtttaaaggatatcctttcgcctatgtaaaacagactaatgtaaaatggaatattacggatgcttttcctaatgggggcgatatggataaggtgttcccgcctgaacaggaattaaaggatatctatcattataacgggaatacgtatggtgtacgtcaggcaatgggggcaggtatttatttgcgtcatgtctggggggatatggttcctgctttttatgctgatcctaaggaaaaccacacggcttatgcatatacttgggtgtattcgcccaaggatcaggaggtggggctgtgggcggaattccagaattacagtcgttcggaaatggatctggcgccattgcctggcaaatgggattataagggaagccgcatctggattaatggttgcgaaatattacctcctgtatggactgctacgcataaggtgaaaagttatgaagtacctttgggaaatgagaattgcgtaggaagatctccattggcggtgcatttaaataaaggttggaacaaagttttcttaaagttacctatcggtaagtttaagatggctgagacgcgtcttgtgaaatggatgtttaccactgtctttgtgactcctgacggagaaagggcggtagaaggattgatttattcaccagataaacaaaaataaaatgaaacgtattgtcttattgttattgggattattattagcgttaccccagtttgctcaggaacgcaagtattctactttttatgagcagagagcgactttgtttgaagaacttccggttacttcaaaagatattatttttttagggaacagtattaccaacggttgcgagtgggctgagttgttccaaaataagaatgtgaagaacaggggtatcagtggagatatctgtatgggggtatatgaccgtttggatccgattgtaaagggaaaaccggtaaagatttttttattgatcggtatcaatgatgtttctcggggaacgtctgcggataaaattatttcagaaataagtatgattgttcggaaaataaagcaagaatctccaaaaacaaaattatatttgcaaagtgtattgccggtgaatgattgttacggtatgtttaacgggcatacatcacgctggcagatggtaaaacaaattaatgatttgttggaaccattggcggtaaaggaaggagctgcctatattgatttgtatagtcattttgtggagaaagagacaggcaagatgaatccagtatatactaatgacggattacatttattaggaaagggatacttgctgtggcgtgatattgtaaaaccttatgttgaccaaaaatgaagaagacattaatactgattttatgtttgtttctttgtaccgtttcatttgcacggaagcgggtgaaggttgcttgtgtaggtaatagcattacctatggcataggtgtatccgatcctgataaggagtcctatcctgcccggttacagcaaatgctgggtgaagggtatacggtggagcgttttggaaagccgggagctacgttgctgaacaagggacaccggccttttatgcaacagaaagagtttaaggatgcattggcttttgctggtgatgtagtggttattcatttaggagtgaatgatacagatccgcgtgattggcccaattaccgtgatttttttatagcggattatcgtgcactgattgattcgttcagagtggcgaatcctgaatgtcgtattttgattgcccgtctgactccgattgccgaccgccatccgcggtttgagtccggcacacgcgactggcatgatgagattcagctggctatagaaacgatagcgaaatacgcacaagtacagttgatagattttcatgcacctttatatccatatccttttatgttgcccgatgctgtccatcccgataaggaaggtgcggctgtcttggcaaaaacggtgtatgaaggcataaccggtgattttggcggtttgcaaatgccggaaatttatacggacaatatggtattgcagcatggacgtctgctgactattcagggaaaagcggatgccggtgagaaagtaactgtttccatagacaggcagcaacttcaggctgtgacgggagcagatggaaagtgggcggtggatgtccggccattgaaggcgggcggtccatatacactgactgtttctacagaaaaacggaaactggtctatgaaaatgtgttggcgggagaagtgtggctctgttccggacaatcgaatatggagttttatctgaattggagtgcgactgccgcacaagatgttcctcaagctgcaaatagcaatatccgtttttatgatatgaaagcccgttggcgtacggatgcggtggagtgggatgcttcggtactcgattcattgaatcatctgcaatattataaggatacacggtggacagtttgttcgcctgaaacagccggtaatttttcggcggtggcttactatttcggaaagaaattgcaggatagtttgcaagtccctgtaggactgatttgcaatgccattggcggatctcctactgaagcatggatagaccgtagtacattggaatatcgttttccggctattttacgtaattggatgcagaatgattttatccaagactgggtgcgtgggcgtgctgccttgaatgtaaagaagtctttcaataaattgcaacgccatccttatgagccttgttatttgtatgaatcgggtatccgtcctttggaacagtttccggtcaaaggctttatttggtatcagggtgagtctaatgcccataatcgggagactcatgaaaagttgttcagattgttggtggaaagttggcgcaagaattggggggatgcggaacttccattctattttgtccaattgtccagtatagaccgtccgtcatggacttggttccgtgatagccagcgtcgtttgatggcggagattcctcatatcggtatggctgtcagttcagataggggagactcattggacgtacaccccaaacagaaaagagaagtcggtgaacggttagctgcatgggctttgaataaaacatacggatataaaaatgtcattccttcgggaccgctttataaatcagtcgtatttagtggaggtgcggcttatatttcttttgattatgcggagaagttgtccacttcggatgggaaaccggttcgtacattcgaagtggcaggtgatgatggattattttatccggcacaggctgttgttgaaaacggtaaaataaaagtatggagtgataaggtgaaagagccggaaacggttcgttacggatggcagccatttacccgtgccaatctggtaaatggcgccggtttgcctgcttccacattccgggctgaatagtatataaattaataaagataggtaagatgaagaaaacattaaaagttttgatgatgttaggatgctttccgatgatgctcagtgcaaaggagtataagaagtcagagagtctgagtcttgataagggatgggagttcgcccaggtcggccggaatgaatggttgccggctacggtgcccggaacggtacatcaggatttgatttctcataataaactgcccaatccattttatgggatgaatgagcaaaaagtgcagtgggtggagaatgaggactgggtctataaaactacttttaatgtgacagatgagcaactctcgcgggatgctgccttgttgattttggaaggattggatacgtatgcagatatttacctgaacggctctttgttggaacgtacggacaatatgtttgtcggctatactcttccggtaaaagaggtgttgcggaagggagaaaaccatttgcagattctgtttcattcacctgtcaagcaaacgttgccccaatgggaaaccaatggctttgattatcctgctgataatgaccatagtgataagcgggtcagtatctatagccgtaaagcgccttacagttatggctgggattggggaatccgcttggtaaccagtggtatctggcggcctgtgacactgactttttatgatgtggcacgcattgatgattactatgtacgtcaggcttcggtaacaaaagatctggcgaaagttgaaaacctcctgactgtaaacagtgtttctgcaactcctcagaaagcggaagtaaccgttgcttattcttataaggagggtgaaaaggtaaccgaacagaaagaggtgacattgcagccaggaacaaaccatattcttcttcccatagagatacggcagcctcatttatggatgcctaatggttggggggaacctgcattgtatgactttgaagccgtaataaaggtggatggtaaagtgatagcttctcaaaaagagcgtatcggactccgtacaataaaggtggtgaaagaaaaagacgatcagggagaatccttctattttgtagtcaatggtgaaccgatgtttgccaaaggcgcgaattttattccggatgatgctttgctgcctaacattactgaagaacgttaccgccagttgttcaaggatgtgaaagatgccaatatgaatatgattcgtgtatggggtggagggatttatgaggatgatgctttttaccaggcggcggatgagaatggaattttagtttggcaggattttatttttgcctgcactacttatccgtccgatcctgcttttatgaaacgggtagaggccgaggcggaatataatatcaagcgtttacggaaccatgccagtctggctatgtggtgtggaaataatgaaatttatgaaggtatgcgttactggggatgggataagaaatacactgatcccggtattatggaaggaatgaagcagggttatgacaaacttttccgtgagttgttgcctcgtaaagtagctgaacttgatccggaccgtttctatatgcatggttctccgtacgaggccaattggggacgtcccgaaagctggaagattgccgacagccataattggggtatctggtatggtcagaaaccgtttgaaagtctggatacggaaattccgcgttttatgagtgagtttggttttcaggcatttcctgaaatgaagacgattgctacttttgcctcaccggaagattatgcattggaatcggaggtgatgaatgctcatcaaaaagccactatcggtaatttcctcatcaagaagactatgggactgtattataaagtacctgaagatttcgatcagttggtttatatgggtttggttttgcagggggtaggagtgcgccagggtttggaagcccatcgtcgtaaccgtccctattgtatggggactttatattggcagctgaatgacagctggccggtcgtttcctggtcgagcattgattattatggcaattggaaagcgttgcattatcaggcaaaaagagcttttgctccggtattggtagatgctgtcaaggaaggggaggatttgaatatttatgttatgtcggacaagctggaagcggataaagaggtgactttattgttgcgtgtgatggattttaatggaaaagttctgactaaaaagagtatcaagggcgaggttccggccaatgcttccaccttatattataaggaaccttatgcgggtataacaacaagtcctcaaaatacttttcttctaatgacattaaaaaacaagaaaggtgaggttttatccgaagaaatttattactttaaccacgcaaaagatcaggagctaccgaagaccgagatccgctataaagtgaagccgatggatggaaaatatgaagtgactctgtctgccagacagctggccagggatgtgttcatagagattcctgttcaaggtacgaaatttactgataacttctttgacttgttgccgggacagacaaagaaagtgattattacttcagataaactgaagaagaatgaaaaggttgatataactatcaagcaattaagtgatactaactaatcaattaatatctattatgaaaactttaatgggccttgcagggctgacaatggcaggttttatgcttttatcctgtaacacagaagtaaaagaagcaaattatcagataattccgttaccgcaggaaatttcggtaatggatcaggctgctccgttcattttgtcaaatggaactaagataatgtatccggaaggcaatgaaaagatgcaaaggaatgctgaatttctggcaagttatatcaaagatcttaccggaaagtcattggctgtacaagctggcacagatggcaaggggataatcctgcaattgggtggaaatgctaaaaatcctgaaggataccagttgaaggtaaccagcgaccaagtggttatttccggacctacggaagccggagtattttatggcatccagactttgcgtaaatctattccggtggcacaaggagtggatatcgctttaccggcggttgaaatcaatgactatcctcgtttctcttaccgtggtgctcatttggatgtttcccgtcatttcttcccggttgattcggtaaagcgttttatagatatgttggctttacataatatgaatcgttttcattggcatcttacagatgatcaaggttggagaattgaaatcaaaggtcttcctgaattgacggaagtgggttctaagagaacggaaaccgttatcggtcataactcgggaaaatatgatggaaagccttatggtggcttcttcacacaggaagaagcaaaagaaattgtagcttatgctgccgaacgtcatatcacggttattcctgaaatagatttgccggggcacatgcaagcggcattgactgcatatcctaacttaggctgtacaggtggtccgtacgaagtatggaaaatctggggagtatcggaagatgtgctttgtgcaggaaatgatgaaaccttgaaattcatagatgatgtattgggagaaattattcagattttcccgtcagaatatattcatgtgggtggtgatgaatgtcctaaagtgcgttggacaaaatgtccaaagtgccaggatcgtatcaaagctttaggtattaaggctgacaagaaccacacggcagaggaaaaattacagagcttcattatcaatcatgcggaaaaattcttgaatgaccacggacgtcagattattggctgggatgaaattctggaaggtgggttggctcctaatgctactgtcatgtcatggcgtggtgaaggtggcggtattgaggctgccaagcagaagcatgatgttattatgtcaccgaatacttatttgtattttgactattatcagagcaaggatgtggaacaggaaccggaagccattggcggttacttacctttagaacgtgtgtatagttatgaacctatgccggcatcactgacaccggaggaacagaaatatattaaaggtgtacaggctaatttgtggactgagtatattcctacatttagtcaggtggaatatatggaattaccacgtatggccgctttggcagatattcaatggacaaatcctgaacataaggattatcaggatttcttgcagcgtttggtacgtatggtgaagatatatgatgtatatcagtataattatgccaagcatgtgtttgatgtgactgcccggtttgagcctaatgcggaaactggtacggtggatgttactttgtctactgtagacaactgtccggtatattatacattggatggcacagatcccactaccgcttcacagctttatacagaaccggtgaagatcaatacaaattgtacgtttaaggctatggctgtccgtcctacaggcaatagtcgtattgtgaaagaagacattgcgttcagcaaatcgacttcaaagaaaataacagctctacaacctgtgaacaagcaatatgaatttgccggtatctctaccttggtggatggtttgaaaggaaatagaaattataagacaggacgttggattgctttttataagaatgatatggaagccgtgattgatttcgggcagccggctgatttcagcaaagtgacacttactacaaatgtggagaagggtgactggatatttgacgcgcgttccatcagtgtcgctgtttcagaagacggtgagaatttcaagcaagtagcttcagaagaatatcctgcaatgactttggataatccaaaccaattatatgaacatgtattgagctttgaacctgtgaaagcacgttatctgaaagtattggcaaagccggaatacaatattccttcttggcatggaggtaaaggaaatcctgcatttctgtttgtagatgaaattactgtagattaattgtaaaatcagtgctggtgttgcgtagcgtttgtcctaaaagatagctgcgcaacactgcttgtaaagaatttgtaaacttcaccatgaaaacatgatcaggaaaataatatatggcatttatgcgataataggcatgatggtagtggctgcttgtagcagccggccggatgtttatgaaatatctcttgagaaaatgcagggatttcctacggaggatgctggttttcttaagggagtttctgcattatatgcgggagtgattgatggaaatttattaatagccggaggttgtaattttcccgatacaccggcggccgatggcgggaaaaaagtcttttacccagatgtatatataacctctttgtcaaatgatacggcttttgagtggaaaaaaataggccaactgcctcaggcagcagcttatggagtcactatttctactgaaaaagggttaatttgtgttggaggagctacagcaacccatagcctgtctgatgtttttcttttatctttgcaaaaagacgttttgaaaaaggatacgttaccatccttacctgcaactatagataatatggcaggtgcattagtaggacattcactatatattgtcgggggaaatgtaaatggcattccgtcctcggccatgtacatgcttgatctgttggatttgtctggaggatggaaaaaagaaacagatattccgggtgaacccagagtacaacctgtttgcgtggcgcaagacggaaaactttatatatggggtggctttgccccggctattgaagggcaccaggcttctttatcggtagatggatatatgtattctccggaaacgaaagaatggtcatcggttgccactccgtgtgatgcagaaggtaatgagatctctttaggtggtggaatgggaacctcttttggcgaggggatgatattgtgtgccggaggagttgataaggatatattcttaaaggctctccaaggtatttatgcgggaaaagaatatttgtcacatcctgtagagtggtatcggtttaacagaaatctgctgctctatcatccacagacgaataaatggactacattaggcgaatatgagcaaggtgcgcgtgccggagctgtaatagtttctcaggacggattccattacattattaatggagaactgaaaccgggcattcgtaccaatgaaattaatagaattaaagaaaatagaagatgagaaaattgattatattggcaggagctgcattgggcttgttgtttgcaagttgcacaaaggaagagcaacgcacactttctgttattcctgcaccattgaaggtggaattgcaacagggagtgtttcctctgaatccggaaacaggattgtatatagatgcgtccgaaggagataaaaagattttgaaagattatttggcggcttctttcatgaagctgaaaccggtagcggcagaagagggacatactattgtcttgaagcaagtggctcaattgccggaggtaaactcttccgaggggtatgttctgacggtaactcctgatcaggtacttattcgtgcgacttccggagcaggactattctatggagttcagactatgctgcaaatggctgatgaaaaaggattgccggtaggagtcattacagacgagccccgttttgcttatcgtggctttatgatggatgtttcccgtcattttttcaacaaggaatttataaaaaagcagatggatgctttggcatattataaattgaaccgtttgcatctgcatcttactgacgctgcgggctggcgtattgaaataaaaaaatatccccgtctgacagaatttgcggcatggcgtgagtttcctacatggaaagaatggtggaataacggacgacggtatgaagaagaaggtagtaaagatgctcacggaggttattatactcaagatgatatccgtgaactggtggcatacgctcaggaacgttttattactgttattcctgagatagagatgcctgcacattcggaagaagtactgactgcttatcccgagttgtcttgtacacacgaaccttacaaacaagccgatttctgtgtcggtaatgaaaagacttttgagtttctggaaaatgtgttgacagaggtgatggaacttttcccgtccgaatatattcatataggaggggatgaggccggtaaagcctcatggcccacttgcaaactgtgtcaggcacgtatgaaaaaagagggcttgaaagatgtgaacgagttacagagttatctgattcatcgtatcgaggtctttttgaatgcccacggacgtaaattattgggttgggatgaaatattggaaggtggtttggcgcctaatgctactgtcatgtcatggcgtggcacggaagggggaatgaaagcggttgattccggccacatggctattatgagtccgggtgagttctgctattttgattcttatcaggatgctcctgattcccagccggaagcaataggagggtatctgcctttggccaaagtttattcatttaatcctgtacccgatactttgagtgcggataaagtccagttagtgtatggagtacaagctaatttattcacagaatatattccgactccggaacatgcggaaatgatgatttatcctcgtattcttgcgttggcggaagttgcttggagtgatccttctgtgaagaactatgatgattttcatgctcgcgcattgaaagaggtagaggcattgaaagctgaaggataccatcctttcgatttgaaaaatgagataggaaatcgtccgggagcggatcagcccatacaacacttggcagtaggtaagaaagtgacttacggaccggatgccgcttattatcccggctattcggccggtggtgatagtgccttggtagatggggtgattggaggctggacttatggtgacaagcgctggcaaggtttcatagacaaaaaaagaatggatgtgaccattgatatggaaaaagaaacagaaattcattctgttggagcagactttatgcaggtgtgtggacctgaagtctttatgccttcagaagtaatcatttccgtttctaatgatggtaaggagtttacggaactgaagcgcatggaacacaaagtagtgaaggatgacaaggtgactttcaccaactttggttgggaaggaaatgccaaagcacgttacatacgttatcaggcatcttcgggtgaattcggaggtttcttgtttacagatgaaattgtagtgaaataatagaacctatataaacaacaaatagcatgaagaaacaaattttgttatcggctgttctgatttgtatctcagttttttctgcggcagcacagaaagagccggtagattatgtaaacccttttgtgggtactactaattacggtacgacaaatcccggagcattaactcctcatggaatgatgtcggtgactcctttcaatgtgatgggagttcccgaaggggataaggataaagataagcaatggtggtccactccatacgaattcaataataaatatcttaccggttttgcgcacgttaaccttagcggggtaggctgtccggaattggggtcattgttattgatgcctaccaccggcaaactggatgtggattatcataattatggaagtttctatcaaggtgagactgcaaatccgggttattataccaatatactggataaatacaatgtgaaatgtgaactgactgccaccccacgtaccagtatggcacgctttacttttcctgccggacaaagcaatatcttgttgaatctgggagagggattgaccaatgagagtggtgctaccgttcgttttgtaaacgaccgtgagattgaaggtaccaagttgttgggaactttctgttacaatcctcaggcagtatttcccatctattttgtaatgcgtatcaacaaagtaccggcaaaacgcggttattggaaaatgatgcgtccgatgggtgtggaggcgcaatgggacgatacagccggtaaatacaaactctatactgcttatacaaaagaaataagcggagatgatataggagtgtggtttacttacgatactacggcggaagaagtgattgaggtcagtatgggcgtatcttttgtcagcattgagaatgctcgtctgaatttggaaaaagaacagcctttcggcacaacattcgacaaactgcgtgcggaggcccgtaagagatggaacgatgatctttcccgtatcaaggtagaaggtggcacggaagaacaaaagggagtattctataccgctatgtatcataccatgattcatcctaatattttgcaggacgtaagcggacaatatccacaaatggagggagacaagattctgaccaccaaccgtaaccgttatacggtattctcattgtgggatacttatcgtaactaccatcagttgatgactttggtctatccggaacgtcagatggatatgatacatactatgatgggtatgtataaggaacacggatggttcccgaaatgggaattatatggtcgtgaaacattgactatggaaggtgacccctctattcctgttctggtagacagttggatgaagggattgcaagactttgacattgacgaagcttataagggaatgtataagtcggccactactccgggcaaggataatctgatgcgtccggataatgacgattatatgtccaaagggtatgtgccgatggaaagccagtatgacaactcggtttctcatgctttggaatattatgttgccgactatgcgctgtccactttggcagaggctctaggtaaaaaggaagatgcgaaactgttccgcaaacgttctatggggtataagaattattatagcaaggatttcggaactttgcgtcctatcaccaaggaaggtaagttctatgaaccgtttgacccgaaagaaggagcgaattttgcacctagtcccggtttccacgaaggtaacgcatggaattacactttctttgttcctcatgatatcaatggactggtgaaactgatgggaggtgataagaaatttgtcgataagctgcaaagcgtgttcgatgaaggaaattatgatccggctaatgaacccgatatagcttatccttacctgttcagtcgtttcaagggtgaagaatggcgtacacagaaattggtgaaggaattgctggctaagtatttcacaactaagccggatggaattcctggcaatgatgatacgggtacgatgtctgcatgggctatattcagtatgatgggattctatccggattgtccgggtgtgcccgaatatacattgactactcctacttttgataaagtgaccgttcagcttgatcctaactattggggcaagaaagaattggttatcaagaaagaaggacaaggggattatataaaggaaatcagactgggcaataagaaacttaataaatatttgatttcgcatgatgatttgatcaaggcaggtgaaattacttttatagtaacagaaaatcctaataagaaataactatgaatacgaaacgatttttgtgtgctgcgttaggagctgtttgttgttttgcttttatgcaagcgcaggtacgtacagagcagactttcgaaaaagggtggaaatttacgcgtgaagataatgcggaatttgccaatcccggttataatgacagtaaatggcagaacgtcaccgttcctcatgattgggcgatttatggtccgttcagtatcaataacgacaagcaggaaatggctatcactcaggatggacagacagaggctctggaacatgccggccgtaccggaggtcttccatttgtaggaaccggatggtatcgcctgaactttgatgctcccggttttgaaaaaggcaagaaggctactttgatatttgacggagcaatgagccatgcccgtgtctatgtgaacgggcaggaggcaggctattggccatacggttataattccttttatgtggatgcgaccccttatctgaaaccgggtgagaagaacgagctggcagtccgtttggaaaacgagcctgaatcatcacgttggtatccgggggccggtttgtaccgcaatgttcatctggtaatcaatgaagatgcgcatatcccgacatgggggacgtatgctaccactcccgtggtgacagacaaatatgcaaaagtgtctttgaaaacttctttggttagtcccgaaggagccaataaggataattaccgtattgtgacgcagattaaggataaaaacggcaaagtggttgctaccggggaaaacaagttgagtgtttttgacaatactttgtttgaacaggagtttgcagtagccaatcctgagttatggagtcctgaaactccggttctttatacggctgaatccaaagtatatgaagggaataccttgaaagacgaatataccactcgttttggtatccgtaccttggagattatccccgacaagggtttctttctgaatggaaaattgaccaaattcaaaggagtatgtaaccatcatgacttaggcccgttgggaggtgctgtaaatgatgccgctatccgtcgtcagattcgtattctgaaagatatgggctgtaatgcaatccgtacttctcataatatgccggctcccgaactggtggaggcttgtgacgagatgggtatgatggtgatggcggaatcctttgacgaatggaaatcggcaaagatggccaatggatatcataaagtatttgatgaatgggtggataaggatttgacgaatctgattcgtcactatcgtaataacccaagtattgtgatgtggtgtacaggtaatgaagtgcctgatcagtggagcggcagtaacggtccgaaactctcgcgtatgttgcaggatatttgccatcgtgaagaccccacccgccctgtaacacaaggtatggatgcgcccgatgccgtggtaaacaataatatggctgccgttatggatgtggccggtttcaattatcgtccccataaatatcctgaaaactataagaagttgcctcagcagattattttaggtagtgaaacagcttctacagtaagttcgcgtggtgtctataaattccccgttgtccgtcaggctatgaagaaatatgacgatcatcagtcttcttcttacgatgtggaacattgtggttggtccaatttgccggaagacgactggatttggcacgaggataacgcatgggggatcggagagttcgtatggacgggcttcgattatctgggcgaaccgactccttattatactgactggcccagccattcttctttgttcggtataatcgacttggccggattgcccaaagaccgttactatttgtaccgcagccattggaacaaagatgaagagacactgcacatccttcctcattggacatggccgggacgtgaaggagaagtgaccccgatctttgtctataccaattatccgtctgcagaagtgtttatcaatggcaagagccagggtaagcgtaccaaggatttgactgtaacggctgaaaatagtgcggattctgcttccatagcagatttcaagcgccagaaacgctaccgtttgatgtggatggatacaaagtatgagccgggaaccgtgaaagtggttgcatacaatgagaaaggggatgctgtagccgaaaaggaaatccatacggcaggtaagcccgaccatatagaattggttgcagatcgcaatgaaataaaggctgatggcaaggatttgtcatttgtcacagtgagagtggtggataaagaaggtaacctttgtcccgacgcacagcatctcatcaagtatgctgtaaaaggtgcgggaacctatcgtgccggtgcaaacggagaccccacttcattggaacttttccatgttccgcaaatgaaagtgtttaacggaatgatgactgctgttgtgcaaagcaccgataaaccgggagaaattacactgaccgcaacaggtaaaggacttaaatcaggtaggctagttttaataagtaagtaaaaagatttgtttcaatttccactatctgtgccccgcttgattttattaagcggggcttatttatttaaaaaagttagaaaataattggggaaacctgcttctaaaaatgaaaaagttgctatttttgttgtcaaatgtaatatgccaattaaaaatcctaacttatcatagtatcatgttgacccaaatcattaacgcaaagattcttaccccacagggctggttgaaggacgggtctgtccttatgcgcgacaataagattttagaagttaccaattgtgatttagctgttatcggagccgagctgattgacgctaaaggtatgtatgttgttcccggtggtgtggaaatccattgtcatggtggtggtggcggtgattttatggaaggtacggaagaggctttccgtacagccattaatgctcacatgaaacatggtactaccagtatttttccaacattgtcttcttctaccgtaccgatgattgaggcggctgccgaaacttgtaccaagttgatggcggaaccggacagtccggtattgggattgcacctggaaggtcattatctgaacatcaagatggccggtggacaaatgcctgagaatattaaagatccggaccctaatgagtatattcctattgtagagaaatggaattgtatcaagcgttgggatgcagctcccgaattgccgggggctatgcagttcggaaaatacattacgggaaaagggattgtggcatctgtggcccatactcaggctgaatatgaagacattcgttctgcatgggattcaggttatacgctggccacgcatttctataatgcaatgcccggttttcacaagcgtcgtgagtataaatatgaaggaacagtagagagtatttatctgatagacgatatgaatgtggaagtggtggccgatggcattcatgtaccacctaccattttacggttggtttataagataaagggtgtagaacgtgcttgtgtcattacagatgctttggcatgtgcggccagtgacagtaacgtggctttcgatcctcgtgtcatcatagaggatggtgtgtgcaaactggcagaccgttcagcattggcaggcagtgtggctaccatggaccgtttgatccgtaccttggtgcagaaggcggaaattcctttggaggatgctgtccgtatggcttccgaaactccttcgaaatttatgggagtatatgaccgtaaaggttccttgcagaaaggaaaagatgccgatatcttgattcttgaccaggatttgaatatccgtgccgtatgggcgatgggcaagctggtcgaaggaacttatacattataaaaaagagtgctttcggcaatttgaactctttatagttcgtcattcttcatttcattcagaaaggcaaactataaagagttttcttatcctttttctatgtgtaacacatatcctttcttcatcagtgattctatcttcacactggagtcattgcgcaacgcttttcgtaaataggttatttgtacattcaatgccagcgaattggcataggatgaagctccccatacatgtttcaacagtatttcccgatctacgggaacatggaggtttttagctaatattcggagtatctcagcctgtcgggaagtaatcagtaccttgttatttcctgtccttatttcattggtggtatagttgaatgtacttttcccgaatgtatagctttctgtttcaattctgttgtctacacattgaaaccgttcacggatacgtgccaacagctcttcgggataaaaaggctttgctagataatcattggcctgcagatcaaaacctttcagacggtcggctttatcgctacggtctgaaagaaagaaaataagtacctgatgattttgtttccgtatttttgccgctacctcaaagccgttcagttcgggcatattgatatcaagcaataccaaatcgggctttattaagggaaattgctgtaaagcaatgtttccgttccctgcgtaagtaacttcatagccttctgcttccaaaaaacgttttaagagcatggagtattttaaatcatcatctgcgaaaagtattttgattgttttcatcttatatgaattgttgaaatgattattgaggtaatacaatactgaaagtcgttcctttacccggctggctggtcaaggatacgtatccgtggtgtgcttcggtgagaagttttacgtaacttagccctagtccgatacccggtatatttcggtctggtatatggctgccgcgataaaacttatcaaaaaccttgctttgctctgctggcggaattccaattccgttatctgttatttgtatagtaagggtgtgtcctttctgtatacaggataaatcaatccggacttctttaccggagtacttgatggcgttctctatcaggttgctgatgatgttggcaatatgtaccgggtcggcgatgaccaaagtggattccattttatagtacggatgaaccgtaacctgtttatcggcaggtatattggtaagccggattaatttatttacggtttcccgtaaatcaaaagtacggatgtggagaggcgtgtgttcatagtcagcccgtgtcatatcccttactttggctaggtaggcagaaagattgtccagttcaaacatggaatcctttactacttcatccattgctctttcgtctgtacgcatggacttgttgttgagaaaggcaatacacattttcaaggtttgtacggggcgtttcagctcatgtatcatggtatttacaaagctttttctcatttcgtctattttccgttgtttcaaaatggtcttgatctggtagataaggcagaataccaagagcagaactaatatcaggctacccaacagctgccatgccatttgttggagaagggaggggaaaggtatctgtatggatgccgtcaatgcctgtttaagtaaaggattataaggataaacaatatacatttcaggtttgaacaatcgggtggaaaaggtatagcttccatgccacaggatagaatcagtctgcatcagtctgatatttgtcagttttatctggttggcttgtaatagtgaatcaaaaatttcagctcgaaaggggtgggtcatctcggctccataacgtgtggctgcatcaaatagaatttcattggaaatgttctctacccgaaaactgtcgcggactataacactttcctcattcaacaatgcattctgttttatcaatgaatccagattattaatttcacttttttgtctataaaaactaatgacacaggttgttttgccattttggttcaccgaatccggcatttctattttgtagctcagtgtatatttgtggttgttagtccgtttgtcatagcgtgtattcatttcttctttttccagttgcagtatttgtttatgcagttcctgcatgaacgttctcgttgaatagcaatattggtgatgaagccaatagccttgaccgcctattatcagtatagctgtaatgatagtcagtatccatactgtttttattcttttttccatcttttctttttttcgttaaagcaaaggtacgggctatccttagatatgcaatgtacacgagggttgttttttcatcggcgtaatatttcagtaataattttgtggtatcgggaaggagagaaggacctagctttgcagtataaaattcatcacttaaaaacaattcggattatgaaaaagaaactggcaaacctgttatttttggcaatcatggcattgccggctacggcgcagataaccattctcgctatggatgatgtgaagaaaagcgaacccatagatgaattggttttccgtgcccagtatgagttgaagatggtagaggacacaactaaggccgaccgtcagcccaattcggaaacgatgatgctggaagtgggaaagaaatgttcgcaattttatagttacactacttatcttcgggattctactttgatcgccgactatgctaataaagtgtcccaagatgtcttgcagcaacatgccaaggcttatggaaacgggcgtattacatatcggatttataagaactatcctacgggaaaggtgacaacgcttgaccggttggctaccagtaatttccgttgcgaggaaaagaatgaaaaaccggtatggaccttattacccgatacggctactattctgacttatcattgccggaaagcaactggtcacttccggggaagaagttatacggcatggttcacgatggaaattcctgtaagtgaagggccttggaaactttgtggattgccaggtctcatcataaaggctgaggatgaccgccgacattattcatttgaatgtataggtatcgagcaattccgtggaccgaaaccacttcttttcaatggaaaaggttttgaatccatcagtcgtagagatttgaataaggtatatgagcgttatgccaaggacccggtaggctttatcacttctacagcccccaatgtaaaattgacggtaaaagatgagcaaggtaacacgttgaaaaactttgagttaccttataatccgatagaattatctgaaaaataacaagatgaaaacagcaatcattctctctttgttgagctttttgcttcatattcacacaaacgcacaaaacacgataaagggacgggtaacggacaaagttacccgtcagcctttggaatccgctaccgtcactttgcaacagggaggggatggcaatatcatcaactatactttgacagatgctgacggacgttttcaactttcctcttcatccttgaaagacaggacaataacggtattttatatgggttacaggaaaaagaccatatcggtacttatcagtcgtccgttaactgtcgaactggagcaggaagctgtcttgctgaaagaagtacagattcgtccggggcgcgtatggggacggcaggataccttgaaatatgacctcacccgttttacatcttccaaagatcggaatgtaagtgatgtgttgaaaaaacttcccggcatcaatgtggaagagaatggaactataaaatataatggaaaagtgatcagtaatctctatgtggaaggtatggatgtgagtggcggtcgttataatcaaattaataataatctgaaagcggatgccgtacaggcagcggaggtcattgaaggacaccaacccattaagtccttgcgtggcaagacctttacggatgacgttgccttgaatttgaaattgaaacccgaagtccgttcccaatggatttataccgttatggcagggggaggttatggagagaagacactttacgacgcttcgttcaatgtactgcaattgagtcgtaaccggcagactgtctatacttacaaggcaaataatataggccggaatctgttttccgaccaacagaaactggcatccggcaatggctttgaccgggtgacggacagcaatcctcccatttttcttcctttacccgaaccggccatgcccttgtcgcaaaaaaggctgttattcaatgaaacgcatacagcttctgccaaccgcctgtaccgattggatgaagaaaagcaattacgatttcagttagggtatatccatgaccgcacaacccggcaatatggaagtgaggaaatctattattttgcacaagatacggtgcatacggctaccaaccggcatgaccgtttaaaaaccgattgtctgaatggtgaagtaaattatgaagataatgctgcaagtcggtacactcgtgagaatttttcgtttgcaggaacatggaaatcaggagtttcggatataacgggtgataatgttattttccaaaagataaaaaattcacaatgggaattgaagaattatttcaaccaactttacaccaaagaaaaatacacctggggaatccggtcgtatatccgttacacccatcttcctgctttactgacagtgattcaccgcaacctgcccgtgtcatctgccgataacagactgattgccacctgcatccaccgtagggacgaattgaatttgcctgataacatcaacgaaaacacatatcgaactgtcaccggacagacatatgaatctatccctatggaatatgaagaaatgaacatcgacaatgcctacacggataatgccctttatgggatgcggaaaaagaatggagtgaattaccagcttacaggtggttttcgtggcgaactttcttcggtgagacaggagaatagttactctgctcctcgttattccttctatactattccccgtatagaatgggagaggactgattttttactcaccgctgctgccactgtctggtggaatcgtcttccaaagcaatcttattcccgtttttatgccgctccctccctttattttcgctataagtttagtccccgttggaaaatgtccttatcaggcagcctggacgagagtgaaggaggaatacaggatatctatcctttccattatcgtgaagattatcgtactgtggtgaaacacacgggaaaagtagctgtaaccgtccggcaactttatacctgctatctggaatacaaaaatactgtcaaggaatttttctggactttatcagcttcctattcccacaatcgttataatctgatggcagaacgtaattataaggacggtaatttttatctttcgtctgtggaaagaaatcattcctcttatagttacgccttgaataccatagggtcgaaaggggtatatgactggaatttgaagacttctctggaactgactttagcacgcaatgaaggtaaacagttgaatgaaaatatcgttcagaattacaggtatgactatctgcgcgtcgaacctaaaattgtgtgggccccttctgcactttttgaggttgaatacaaagcgacggtcagttgtgggggttccggaataggaaaggatacccgtttagaccctttatgggatgtagctcaacggctgactctcagtttgggatttcatgatacggacttccggttatccggagagcatttttataatgatttaagcaaggaccagcatctgaatacttggcttgcagatgtttcattgatacataaatccggaaaatggaggtttaccgcttctgctatgaatctgtttaataaggaacaatatcgttatactctttattctgctgtgcagaattatacttcttgggtaaaacttcgtccccgcgaatttatggtatctgtggtgcgcccataaggcggtgtaataaatatctatttagcaatagattaggttagagttctatgaaaataagacctactgtcatccgacttatcccagagggaaacccgagggggagtgtagcatgtcggagaagccataagtcagccaactgccacgctgcgactgaatggcaagacagaaagacggacatgaggatgaagcctgaattggttgaacaacaatccagtggcacacaccagagctgtggcggaaggcagttactaacgccacatcgcatgtaccccagcaagtgctcagattgtttggggcgaagaactgactgcgacacgtctgcgataagcagattaacggacgaacgttgcatccgacagtctgtcatgcttgttattacacccgctaaatggggattgcctaaaccgaaacgccgaaaggctatagaagtcgttcttgaatattcggcatggcaacggagcttccatagtagtccgagcagggtaatgccctgcacatggcgaagggaagcagttatataatcaatataatcaaaggaaaatgtgagagacattatgagaaatccaaagaatgtattgaacaacttagtgaaacacagcaatgtatcgggctataagttcgaacggttgtatcgtattctattcaatgaacagatgttctataccgcctaccaacgaatctatgccaaacagggcaatatgaccgctggaacagacggcaagacagttgacgaaatgagtattcagagaatagaaaatctaatctccaagcttagagacgaaagttacaaacccaacccagccaaaagggtctatatccctaagaagaacggaaagaaacgcccgttgggtatcccgtcttttgaagacaagttggtgcaggaagtggtacacatgatactggaagccatatacgagggaagttttgagaatacctcacatggcttcagacctcgtagaagttgccaaactgcattaaaccaaattcaagatacgtttctcggaacaaaatggtttatagagggggacataaaaggcttcttcgacaacatagaccataatgttctgattggcatactcaaggaacgcatagcggacgagaggttcataaggctcatccgtaaatttctgaacgctgggtatattgaaaattggaaatacagacacacgtacagtggaactccgcaaggcggcatcattagtcccatactggctaatatttaccttgacaagttcgacaagtacatggaggaatacgcccaatctttcaataaaggcacaagcagaagattggataaggattaccgtcggattaaagaccgtaagaacaagctggaaaagaaactgaaatccgaaaccgatacaaaggtacggaaagaccttattgataaaatcaaagggtattaccgacagatgcaacaaatgccttgtgtcatggaaatggatgaagagtacagacggttgaaatatgtcagatacgcagacgacttcttgattggggttgtcggcagccatgaagaatgtgggcaaatcaaagcgaatatcacgcaattcatgaaagataagctaaaacttgaactgtcggcagagaaaacgcttataacccatgcacaagaaaaagttaaatttctgggatatgaaataaccgtacgcaactccaaagccaccaagagagataagaatggagtgctcaaaagaatgttcaaccgcaagattgtacttctactcccgagagaggtggtcaagaacaagttgattgactacaaagccatgagggttatacaaaccaatggcaaggaggattggaagccaaaggcacgcagttatatgatgaactgcaaaccggaggatattgtagcccaattcaataaggagataagaggattctacaattattactcgatagcgaacaatgtatctactctttgcaaaaggttcggttatattatggaatacagtatgtacaaaaacatcgccaaaaagcaaagcagcagtgtacggaagattaaaaagaaatactcgaaagacaaagactttgtaatcagttacacggatgcaaaagggcaatgcaaatgccgtgtgttctataatgagggtttcaagagaaaagacgctcaatgtgatgctaaatgcgacataattccaaacaccaattttctgccagcctcaagtcttgttgagagactaaaggcggaacagtgcgaggtatgcggagtgcatggcaaaacggtgatgcaccatgttcgtgccttgaaagacttgacaggcaagaacgaatgggagcgcatcatgctcaaaatgcaccgcaaaacattggcagtctgtccagaatgtaatgctaaaatacatggcaatgtataacaccaagttgaattataacggagagccgtgtacatggagacatgtaagcacggttcgggggcaggctctcggaaacctaccgcagaaatgcggcaaggcgccgagtgccgagcctaccaatatcagtggtgaaaaagaattgggatggagttaaacttgtagctttcatgtaaggacagtgctgtgtgttttactgaaagtatgaggtggactgtatctttttagtgttgcataatatatcctcttctatctcttctgttgtttcttcatggtattctttgtagataaccccttcattcagatagtggataatatcacatatttcccttaacgaggcaatgagatgtgatgaaattatcaccgtcttttcttttgctttcagttgccggatgagtcttttcatcaggatacaccccttcaagtccaccccattgaacggctcgtcaagaataaatacgtcattttcttgcaataataatgccataaatcccagtttctttttcattccggtagaatattcggcagcatacctgtcaaggggcagttggaaaatttcatttaaatgttgaatggtgagtgtactgaccggcagacctttggccttcatacagaattccaagtattcaagacccgtgatttgggaataaaagaagttggatgcagacagataacctgcttttaaagttttgcttttggttatgcttccagtataatcatagattcccgtcatgcagttgaataaagtagtctttccggcaccattctcacccaccaaaccatatatttttccagggtgatattctaaatgaatcccgtttaatactttgactttaccgaattttttatgtaaatcattcacttctatcatagtaatctttttaaatgtttgcgtgtctggcagctcaacaatgtggtaagagccatgccgggtattaaaagaaacggaacaaaaagagaacctaaataaaaaggcatcaatatacttaattgcacaataaacagcaataggggggatgggatgatatggcgcaacatactgatgccaatggcataaatcaaggtggcgatataataagataagaaaaagaggatttcatcttggtcataggtagatgctataagtgctaagccgaaaggaatggaggtgatgaaaacattccatgcgatacttttcgattggaaacggcataaagtcttgaaatttttgaaatgaagaagatatccggtgtccattggttgcagatagcctgacgcctgtatcaatccccatagaacgacacacactttgtctatttttatatttccgtgtacggttcctgctatggaaaaaagcaagagtagggcatatatccagaaagattggcggaacatccgtatatattcataacttcctttgtagagaaaaggtaagcggataggtttgtgttccagcttcatttctttcaggaaaggcaataacgtggcgaacagccataaaccgatagcttctgtaaatcgcccttttatcatttccattcccgcaaatggcaatgtgattaaagtatactctttgatcaggaagactggaagatgggacgttaaagtgtgtagaaactctttatcttttctataattatgatagctggccaataagagaacgcataccacaggaataacgaaacggttttctgccaagaacaatatcatgatggcagccaccgttaagatggtaaggaagactattctgaagatgcccagttctatgactatccttccaaaattttttaaacgaagcagcagatacagctgaaacataaagtgcttttttattctagttgagggtacaaaggaataaaatatccggttaagtaccctcataatggagtgaaaaattattctttatgctcctctttcagttctgccaactctttgttcacccgtgtcagctctttaattctgtcagatacataatggaagaggaaatagtcagtcagaatagccatcagcatcaagatagatatggtcaataccatccaccattgatggtaattataaaaaaatacaccgaggaatatggtaacaattgggtatcctgtaatatagccccaatgaaataactttttgtattggagtacattccttatttgttcttccagatttctttctttatttttttccagttttataattccgataaagtttagagccaaaacataaagcaagattccaaaggttagtcggcagaaaggggagaaagttacacctttgtgctataaaaatctttgtattgaaagttggtattacaggtctgttctttcaaatgcaatgatttagtaattttcttaatgtagcaggcaggattactttttgcggacgttaaagcatttgtcgaaaaagtcttttttgtttttcccgtaaacattcgtgtcaagtcctttccatgtctcaggaaatatctttttagcgagttccacctcttctttaagaaccgcaatattatcagtcatcaatgccatgttcagtgcgcggttaatgcggaaactggcatacttgaggctgtctgtagcatattcttttatgaggatggcataggcggaatcggcagaccgataatttttttgggcggtaaggctgtctccgaaataatcttcaaacatcgctttcattgaccataagtcggcactgagggtggattgtttttcggcttgccggagtacagacagaatctcatggtactttttgcacgctgataaataactgattcttcccacatacacttttatattggtagggtcaatggctaacgcgctgtccagtttggcccatatttccttgtcgtttatagagatatgttcactgtcattattaaagaagaaagtgctgtccaaagaaggagaccataggcttcccgcttctgctaccagacggttggcttcttgggtgtggaggttttcttctgtagttacggggttggaatggtgtttgcatgaagctgtaagagttaataataagccaagtaaaatggtggttttcatcagtctgtgtattatgggtattagtttgttgccaacacaaaaatacgataaaaaagtgatatgtggcaaaaaggcagtaagagttttgttgcaagtgtcgattttgcgcataggacttctttttctaactcatatatatcaaatatattttcagatgattggttataacggttctgtttatatcagacaatgttttcattgctttccgtgtacatcaaatcacttcgtatccttttgtttattcattctgttttttacgaaagggccaactacctgattatttttctccttaatccatcttttccgttatattaagcctttttcccctaaagattaagtacttttgtccagatgtgttctatctccataggttgcggagttgactccataagctttggagataactccatagcctttggagttaagtccaaagcttatggagatagaatacaaaaggaagagaacccttaaccatagagcagaaagggcttacggatacagatcaaatcttttaatgatggatataaaatatgatttcaaggccaaccctttcaaggaaaaggacggcaagccggtgctttatccggcggtagtggtgaaggaaacgattactaccgatcacattgtgaaggagttgtccaagcacagcgcatattcggcgggctgtgtggtgggggtgctacaggaggtggccgatatggttgtatcccatttgcggcaagggaaaaatgtgcggctggacggactgggtacgttctctcttgccttgtcctcgcgtgaggtgacagaccggaaagagatacgtgcggcatccgtgaggataaagaaagtgaacttccgtccggtaccggagttagtcaagagggtacgtcaggatacggatatccttcgtgccgagttcggcttcctgcctacggggaagaagtatactaaagaggagcgttggaaattgctggaagcttatttgaaggaacacggttccattacacgtctggtttattcggaatgcttggggatggcgcgcaccacggctgcttatgagctgaaggggtggtacgaagagaagagattggacaaagagggaaagcactctcatgcggtgtatgtgctgcgcaagcaggaaagtgttcccgaagtttagtttttttatccgtttgggaataaaaagagaaggaaggtggttatacaagaaagggtggtagcagtggtagcactttttaaaactcggggtttttcttcattttgggggcaacacttcactaccaaagttcgaccaataaagacattcgaatgaatattcgaaaatagagaataatatatccccgaatacaatctaatagccgatgaataaagggatatgaataaatcacttgcccccaaaatgaagaagaaccaaaaactcagggtagagacttttacagtttgtcatgtaaagttccggctgctttcagataagccacatagttcaggtaaagttggaaacgggcatccacttgggtttcgtatgcctgttgccatagtgcttgggcttccagatggtctgaaagagtttccagtcctacttcgtactggcttttgctgacgcgtcggttctcttccgcctgccgcagggaacggtcggcaagttcgctttccagtttcgcttcgtccagattgttggcggcctgggtcagttccagtagcatttgctcgttcagattttgctgttgcagacgggtctgttccagcctggctttggctgcacgtaccttgttgctgcgttcgccgaaatggaaaaggggaatacttacgttcaacaggacagagaaactggcattatccagaaaattcttttcgttcagttccaaaccgtgtacatagtcgtatgaacctttgatgcctactttgggaagcagttcgctgcggtttaacttgacttgttggcgggcgatggccacttgtttgtccagtataccgtattccggacgacgggtgatatccagtacctgtaattccatttcctgttctatttccgggaaatctccggaaatgaggatctccgtggtcagcggttttcctatcaggtggcagaggttcatggtagccaggcgtagagcattctcggctttgcgtatgcccagttcactttcattcagtttcacttgcactttcagcacatcgttctgaggtttcagtccgtgcttgtaggcactctccacgttcttttgcaattcggccaatacggcatggtatgtgtcggccactgttttcatctctttcgctttcactaccagagcgtatgcctggtctgttttcagaatgacttctgtggcggtcagggtttcgttcatctgtgccatttctttacctaacagggacattttgtaggcggcgcggattttaccgcccatatagaggggttgttctaattgtatgccacccatgtagacccatcctatcttgtaatccaggttgataccgggaaaataggcgaaacctgagggttgtcccggattaaactgtccggtggcgtcgggcagaaagacgggcaggttgcctccggctatgccataactgccgtcggcattgctgtaaagtcccgttccactagctgtcagattggggaagaagttccccttgtaactcttggctgtgtagtgggcgctttctgtttgttttacagaagccgccatctccttattgtatttcaatgccatttcacggcattctttcaaactcagtgtttcctgtgcctgtgccggggcgacaagatgccataacagaaaacagaaggggattatcattgtttttttcatttgttcttggttttgtatgtcagtgaaataaatcaatcgtttcttattttgaagaacaaggcgtataatataggtataaagagcagcgtaatcagcgtgctgcacagcaatccgcccatgatagctgccgccagtgagccgaacatggcatcggacagcaagggaatcatacccagaatggtggtcagcgaagccatcataacaggacgaagacggctttgggaactgtctatcaatgcggtaacaggttctatccctttactgatttgaagggtgatttcatccatcagtacaattccgttctttatcaacatgccgataaggcccaaggttcctacgatggccacgaagttgaataccttccccgtgagcagcatcactgctaccactcctacaaaaatcatcgggatacagcagaagatgatgataggcttgcggtagtccttgaatagcattatcaggatggcaatcatcagaatgatggccaacgggaagttctggaacaggtatttcatggactggtcgctggctatcttctcaccttgccacaccagtgaatatccttcgggtagttgtatcttctctatacgttctgcaatggcaagacgtgctttttccgtttctatgcccggtgcgggcgaacactgtacacgctggcttctctgaccgttgtaacggggaactaccgggtcttcccatcggatatcaattcctttgctgatttgcttcagcggagtacttcccatgatgctttccaccaaatcttctttcgaaagcgtgccggctttcagtttcaccatggtttcttcgttcagcagtccgttcaacgagggcagtgacgagaagacttgtgcattgcctaaatcttctatgggttctcctttttcgtcaaggcatttcagatagatattgtttttgtggatgccttcgtagaaagagccgatgggaattcctccggtagctgtgagcagggaaaggctgacatcattgcggctcaggccgagggcacgggcggacggctggtcatattcgatggtcagtacaggaatctgaggttcccagtcggtggtgataaggcagacttccggtgtattttccatgatggtacgggcgctgtctgccagttggtgcagaacggcagggtcggggcccaggaattgcgcttctatgggatatttcttgaacatcagattgtatcttttcaatttgatgtatgcgtccggataggcttgggagaggtaagcttggatttcatctatatgttctaccaaggtttccggtgaggtgaaatcgataatcagttcgccatacgaaagcgatgggttggcaacgctccgcaccaggttatagcgtccgggcgtaccgcctatggaggtggtgacgtgggttatttccttgcgtcctttcagataggtttctatttctttcaaatcttgtgccacacgagtgtggttgtttccttccggcagtttgtattccatgtaaagctggtcgtaaaccatgtcggggaaaaagccctgacgcatgtatggatagccgaaagcggaaagtagcaacaggccaatcatggtgaatacaaaactccaccggtgggccagaccgaaccgcagtgccgaacggagaccggcatagattttacctttgtacacacgctttccggtactgtcggtatctatggcaggatgtagtctgcggtcggccatcagcggtacgtgaatcagtgccaatacccagctcaacagcagggaaacggcaagtacgatgaaaaggtcgcgcgtgtagacgcctgcggtgtcgggagacatgtagataggtagaaaggcgataatggctatcaaggtggctcctaaaagaggcatagctgtctgtcgcccgatagcggtcatggcttccattcgtttttttccggctttcaagtctaccagtatgccgtctatgatgacgatagcattgtctaccaacatgcccattgccagtacaaaagcagccaatgatacgcgttgcatcgttccgcctgccgaataaaggaacaggaaagaaccgaatacggtgatgatcaggctgatacctatgataaggccgctcttgaatcccattgctatcatcagtatcagtactacgatgatgacggattctatcaggttgatgacaaaggttcccaaagagctgcctacccgttcgggctgatagaagattttgtggcattccactccggcgggcagacgtctggttttgagttcttccaacttgctttctacggcatggcctacttttataatgtccgagccactggaggcggcgatgagtataccgagagcacgttcatggtcataaaacatttcattgcgtgtgggatcctcgtagtctttttctatacgggcaatgtcgctcaggcgaagctggtcatcatcatgtccctggaccagcatttttccaatatcttctacggttttgaatttgtcgtttactgtgactcggatacggttgtcaccattttcataatatcctgtataggtggttttgttctgtccgttcagtgtggcgagaacttcggcaggtttaacaccgaggtttgccatacggtcttgcagcagggagatgttgatacattcggaacgtttgccgtagagttccacacggtccacgccttccagttcgttcacttcccgtttcaccagttcggcatagtcggacagttcacggtcggacagtccgtcgcctgtcagggcatagaacataccatatacgtttccgaaatcatccttgactatcggggtggtggctccttcgggcaacagggcgtgggcgtcgcttactttgcggcgcagcatgtcccagcattgttccacttcgtcgtccggcacggtgctcagcagttctatctgtatcagggataagtcgttgtatgaataactttctatattgtctatgttgcccatggtgcggatgttcttttcgagcacgtccgttacttccagttctacctggtgggcggaagcacccggataggtggtgactaccatggcaagctttacttttatttcggggtcttccagcttgctcatctgatagcaggagtaggctccgccgagcagcagaaccgctatcaggaaataaatcagattcctgttacggaatgcccatttgctgatatccattataataatcctcctatatttgtgttagtgacaagtggtaaaggttttacagtttctccatcctcgatgtgatgtactcccgaggatacaatcagctctcccggtttcagctgtccggcagtgatgaggctgtgtccgttgttcagtaaacgtagcatggatatttcctgtttgtgcactgtgttgtccgatgggttgaagacgaatacatacgctttgccttctttttgcaggatggcgccggtagggacagagagagtgttcgtctgttctgtgcggtaagagatggtgaccatggtgttcattccgggagaggggacagccggcgttccgggtactacttgcaggcgcatggtgtataattggtttgcattggctttcggggtgacactgattagtttcagcggataggtttcgcccggatagatgtcaaacgtacagtgataattgtcgaactggtcccggcggatgtattcggccgcaggaaggtttatttctacttcgggagtcccactgctgatcatggataggacgggcattccggctccgatggtttcgtgagcttcaaacaggcgtttttggacgtacccgttgaagggggcgtagagccgtgtataagccagttggtctttgtgatgtttgtacttggcagtgatttgtttgagtccgtatacagctttgtcattggcgttgggggtggttccgttgtctttgtaaagggccatgactctttccgcttccgcttttatttgctggtattctgcttctgtggcatccagttgtacttgatagtcggtggggtccagttcggccagtaattgtccctcctgcacacgggtaccgtcttttacatgtattttgctgatggttccgcttacccggaaggcaaggctgatatcttgtgcggcttttacctttcccgggaattgcaggaaagtttgcttgtcggcagaaacgatcgtgtctatttttactgtctgatagcctttggcttcctgggtacgctgtgtgcaggaactcagtagaatcaaggaaatacctgttagaataagataaatttgtttcatatatcatgctattggttttctgatgcaaagttatcccgaagcaagaggatagaaaaggttgatatgaatgataaattgtccgatttgtatattttctagtagatatatagctgaaaagtttgcgatttgtatttattttgcagtgaatgaataaaagagatagatggatggtcggacaacagatgccttttcagtttacagtgctttcgagcagtgatccgcatacttttaaagacggacagattatttctacatttaataaatgtggctttttcttttgccggaggggaaatgtggaggtttcactggaagataagctttttcagataaagcccggtgatgtgtatatttacatggcttctaccttggtgcatctgcttcataagagcgaggatgcggaaggaattatggttgaagtggatttagattatatcattcctatcgtcaatagggtgataaatgtggaaaaccagctttttatgcggaagcatccttgtatatcactttcggataagcaacgtatccatttggagtatctgttggataatttgcaggaaaggataggggcggaggacgtactggaagtgaatttgcaacaacaacgcctgactttagagttgattaagtcaatgggacagactttttgctatgaaatattgaatatgtatttcgctaaccaacccatgcagcctttgccacagaataagaaggatgtgatcttccagaatttcatgctggctcttttccgtttgtataggaaagagcgtgatgttgcctattatgcgaagatgcagcacattactccacgttatttttctacgatcattaaggagaagtcggggaatagcgctttgcaatggattgtgcagatggtgattaccgaggcgaaacaattgcttgaaggatcggatttgagtatcaaggagattgcgaaccagctgaatttccctacgcagtctttctttggaaagtattttaagcaatatgtggggatttcacctaaagaatatagaaaaggcaagttgaggattaaggatggaatttgatttctgaaaatgcaatctattttattttaatgtacctttgtgtacaaatcataaacgttttatttatgacccgaaagaaagaacaagagcaattcatatcttatattacagaacggcaaactcatgagggccagatggcagtggctgattttttgcggaaatatgctgtccggtatcataactctgatttcatttcctctgatccggtgcagtttccgcatcgttatcattctaaggcggatattgaaatcagtgcttttttgactgcttttcttagtttcggagcccgccctcagatactgaaggcagcagaacgactggattctataatgcaccggcagcctttgcagtatgtgttgtctggaaactggaaaatagatttctgtggtgaggagtcgttctatcggacggtttcaaaaaataagatggcacaattgttttattggctgcatactatatataataggtatgagagtatggaggatgctcttctttgcgaaacggatggaactccgatgcaacgtctttgccgtttgtttggagtgtcggataaggcgccgcaaaagaaattgaatatgttcctgcgctggatgatccgtcgcgattcggaagtggattttggaatctggaggaatttctctccatgtgagttgattatccctttggatacgcatgtcagtgagatggctttcagattggagctgacccgaagtaaatcttatacgctgaataatgcgagaactattactgcggctttggctgaggtttttcccgaagacccttgtctgggggattttgctttgtttggttatgggattaatgaattatgaaatgtagttgggggtgtgtttctcgaaacaggtagctgtggtgaggatgattatggaatatcgtttgagataagtggaaatctaaaaataatccccgaaggatatcacatccatcggggattttcggttttttggttaaaggttagtataaaattaggttaggttgtttcttaaattataggggtacgtattctacaaaggcctccattgcttcataacatgccaaaccaagttggtcatacaaagcggctgtaccccgattgcggtcttcacttctttgccagaacagacgttcgtcattgcccaggaacggtgcgctttccatctgagactgatgctttaagatggagttacgtttagcacgcagttcttcaggactgaacggtacggccatttcaatgttttcaatttcccattccgcccatgcgccacgatacatccagatgcgacagtctttcaaccattcggcaccggcttctttctcgatgtcaatagcggcaagcactgcgtctgtgcagacacgatgggttccgtgcgggtcggccaagtcaccggctacataaatctgatggggctttacttcacgtaataactgcaaaacaatttctacatcggcttcactgatgggattcttttcaatcttgccggtttcatagaaaggcagatcgaggaaatgaacacggttcagtggaatttgattgtaagtgcttgcggtacgggcttctccacggcgaatcaatcctttgatggtcagaatatcacggctgtccatatcgccttctttcttagcggcaaggaatttcttgatttcagcatatttgtttttgatggtttcgttggagttttcatcaaaaagctggttgaaaccgttgatgaagtgcatgaaacgtactacttcttcatcgcctacggcaatgtttccggaagtttcgtatgctacgtgtacctcatgaccttgctgaaccagacggcgtaaagttccacccattgagattacatcgtcatccggatgcggagagaaagcaaccacacgttttggaaatggtttcgcacgttcggggcgataggtgtcgtccgcattcggcttgccgccgggccatccggtgatggtgtgctgcagatcattgaatattttgatatttacgttgtaagcagaaccgtaaagtgccaacagttcgctcaatccgttttcattataatctttattggtgagcttcagaatcggctttttaacacgcatacataaccatacgatggcactgcggattagtttgtcgttccattcacagttggtaaccagccacggacgttggatacgggtaaggtgagaagctgcagccaaatctatgcaaacatttgcattgttgtgcatttggagataagaagcgggtaaggtgtcacttactttgtcttccaccgctttcttgatgatatcggctttgtcatctccccatgccagcaaatagattttccgggcagtcataatagttgccactcccatggtgatggagcagggaggaagattgtctactcctaagttgtgtgcagcttcagcacgcgaggttgagtcaatcaaaatcagtcgggtaggagagctcaagcttgatcccggttcgttcatggcaatattgccttcacgaccaatgcccattaatacgatatctataccgccaaaagtttggatacgttgttcgtacaggcggcagtattcgataacagcttcctgcggaatcgttccgtcgatggtgaatacattttgtttgtcaatatcgatttggctgaggaataaatcgttcagttgtgagaaactgcttcccgccccttcggaagccaaggggtaatattcatataaattgaaaattactacgttacggaaacttagtccttcatctttatgtttacggaccagttcggcataaagcggacgtaatgaagcaccggttccggcaccaatcacgcagaactttccttcgcgctgacgttcctgaatttttgccgtaatttcattggctatttgttgtacgccttcttccatcgtttcatagatgtcggtaggcactttttcgcagcgggttaagacagaacgttccaccgcattttcgggtttataatatttcggagatactctgttcagagaaatctgcgaacttaggtttgttctcataaattacaaattagctttttcgatgtctttgaaatatttgtaagtaccgactttcagttcgtctgtagcggcttcgtcacaaacaatgatgccatgttggtgcatctgtaatgcgctgatagtccacatttgtgtgataccaccttcaacggcatgttgcaaagcgcgtgctttgttgtgtccgttgcagataatcagaacttctttagctgaaaggacagtccctacacctactgttaacgcagttttaggtactttgttcacgtcattgtcaaaaaaacgtgagttggcaatgattgtatctgtagtcaatgttttgatacgtgtgcgtgaagacaaagatgaacccggttcgttgaatgcgatatgtccgtcgggaccgatacctcccataaacaggtcgatgcctccgatttcggctatttgcttttcgtagttggcgcattctgcttccaggtcttcggcatttccgtttagtatatgtacattttctttctttatatcaatgtggttaaaaaagtttttccacataaatgtatggtagctttcaggatgatcttcaggtaagcctacatattcgtccatattgaaagtaacgacattctggaaagatacttttccctgcttgttcagttctatcagtgccttgtacatgcccagcggtgaagatcctgtaggacaacctaaaacaaaaggtttttcaggagtcggatttgccgcattgattttactagctacatagtttgccgcccattgtgacagcgcttggtaatcaggttcgataattactctcatggttctttctttttttaagttttaagtgttaagttaactatacgggttattccatattatccgttttaggacggaggaatgtcaactgtacgaccaatgctattgcaacaatgatggccaacatggcaaatcccagtcccaacttacctccgtctgtccactttcccaagacttcggtaatggctgctcccgcaaacacgcctgtcatattcatgataccataggcggtagcacggtgtttggatgatacgaactggcatagaatcggcatattgttggcatcgaagataccataaccgataccgaataataatccagctcccacaacggctacgaaactatggccgaaccctagtaaaagcagggatggaatagtaagtcccaagccgatggcacccgtgtacacacgtccttttatatttctttgcacccacttatcggataaggttccaccaataattacaccaatgaacgaggatagtgcgatggtgatagtcgacatggggccggcttgtgacatcggtatattcaggttctcggcgaacaaggtaggtaaccagtttttggttgcccatcccggtaaactgggggctgcgaaatatagcagaatcacccagaatgcaatattactgaaaagtaatgataatcccttcaataaattgcttttttctttaccggaaggtgaatttatttgttcaatttgtattctatccttcttttcatgtagaaaaagcatcaaaattacggcgtatgcaatgccggcgatgccgaaccaatgaaaggttgtatgccaggaaaaagcggcggctactgtagcgccgaaacctccgatggcctgcccggtgtagagcccggtcatgtgaataccgatagctaatgaacgtgacttatcggagtgatagtcggcgatcagtgataatccggcaggaatatagagcgcttcgctgattcccatcaaggcgcgaaggaaaaagacttcattataagtgtcggctattcccatcagataagtgacggccgaccatacaaacaaactgccaacaataagccatttgcggttcatgcggtcgcccaccattccggctatagggctcatacagccatatatccaaagaaaaactcccatcagtcgcccaaaattggcagctgactgaagctcggtgatatccaccgccatggcatctctcattgtggatagcatttgccggtccatgtaattcaacagggcgacaccccataataatcctactacaacccaaggataaattttactgtttttcatgctaatagataaagggctttataaatgtgattttttgttgtcgagtatttccttgcacaatgtatagcccttgatcatcattcttggaatgtggaacgggcctttgaataggttacccttggccatttgtgcaggcgtgccgtcacgatggagatatccaaaccattctccacactctttatcaggaaaatgggcgtatgtccaatcgctgatttgtttgtgcatgtcaaggtatttttcatttccggttgctaaatatgcatacaaagtagcgatgacagtctctgtctgaggccaccagaatttcatgtcttgggaataatcctgtggcggaaggttcttgcagtctttgaagttgatgatacctccgaattctttgtcccatccccactcccaggaccaatcaaagatagtgagggccagttccgtaatgtctttgtcccagttacggtatttggcttcttccagcagaaaccaggctgtctcaatacaatgtcccggattgatggtgcggcccatgttgctgtcaatgaattctccgttgggacctactgtttcaagcaaagccttgaattcaggatgcatgaagtctttacgtagctggtcgatggaggcgtcaatctgtccattgaagctttcgtcctgaatagcctgacggatacgtgatgccacattaatcagaatcatggtaatggaatgtcctttcatcgggagggtatccagatatttgggagccagtatgcccggtgtttccataaaatactgcatccgtttgaacaagtctaatgcttttacagcatacgtctggtcaccggatgcgatggcatattccgacatggcgatggctgcgaatgactccgaaaaaatataacggcgtttgcgcaaaggagtgccttcggcagtcacttcgaaatacatacgtccgtcagagtcaaaacaatgcgcttctataaagtctattgtacttttggctgccgccagccatgcttcgttcttttctatattattatatgcataggaacagataaaagcaaatcttccttggaaccacactgatttggtggtgtccatcaagctgccgtctcggtcaacgcaggtataaatacctccattgaccttgtccagcccgtatttcagccaaaacggcatgatattggtggtcagatctgttttgtatgattccgaccattcttttatatagtctattgaaaacatcgtggttcaggtttatttgttacatctttcgaagaaattgattgcttccagttcggctttcatggcagcttcttcctcatctgtcatgttctggaacggagtccggttctttcctaaatccagcccgatcagtttcatgatgcgtttaccgccaacgatgtttccacgatagtgacagatgacattgataacttcctgtgcgaaattctggcgttcgcgtgccagttccagatcaccggctttccatgcttcgataatacctgtgagttctttgccgttatagttggttgttccaccgataccgccctgtgcaccgcccatagccagacaaggaaggatcgtttcatcctggccgtgcaacatgtcaaatttgccatttttatataaacggcattggttgtattcatacaggctttcgaaagtatatttgataccggcgaaattaggaatgcgaccgtctacggcttccaagaatgctaccattgagaggaatgctccgttgaaagctgggatgtgataaaaatagaaaggaagtgcaggagcgccgcatgctatttcttcgcagtatttcaccaattcttcaatgcgtcctactttggggaaaggaggtgccattgctccgataccccatgctccgattttctgagcgtgttctgctagacgtttgcttgattttacacaagtgcttcctacatggacaatgactttgaatccttcgggtgctacttccatccagcgttcagccagtttcatgcgttcgtcttctgtcagcatatagccttctccggaagaaccattgataaatacgccttgaagtccgtttctaaccaatagttggcaataggcttcaataggttcataatttacttctccgttctcataaaatggagtaaaaggtgcatcaattaatccgtgaatcttttccatagcctttaatttatttgaaatgaatattttatattacttaatcatgttgcgtgcaaatatataaatgatttatgaaaacaacaagtaaaaactaaatttatttattaataatcactcttttaataaatagaaagatgaataaacgactaggaaatattatttaaatgtatctggaaagtgggattgttacaaaaaatgataatttgcttacatcttctaaaatattttttgaaaattctctttaaatgtgatttgatttcataaaaaaataactatatttgtggacattaacggaatattttattatgggtgagaatttgttgaaagaaattgaaaagggctcaaagatggctgtgatgaagaagaaaatcattacccattatatttataatggaagctctacgattactgatttagcaagagagatggatttaagtgtgcctacagttacaaaattcatcgatgaaatgtgtgaggaaggttacattaacgactatggaaagctggaaaccagtgggggaagacatcccagtttgtatggtttgaatgcagattccgggtattttgtaggtgttgaagtgcgtcagttttccattaacttagggttgataaattttaaaggagatgtagttcagctaaaaatgaatgttccttttaaagcgaagaatacccctgagagtttagacgaattgtgtaagttgattaaacattttcttcaaaaagtcagtgttgagaaagataagatattaaatattaatgtaaatctttccgggcgtgtgaatccggatttgggatatagttacagtatattcaattttgatgagcgcccgttgacggatgttatatcagaaaaggtgggtggttatcgtgtttctattgacaacgacacccgtgctatgatctacggtgagtatatgcaaggtgttgtgaaaggtgagaagaatatcatctttatcaatgtcagttggggattgggtatgggaattatcattgatggaaagatttataaaggaaaatccggtttctctggcgaattcgggcataattttggatatgagaatgagattatctgccattgtgggaaaaaaggatgcatagaaacggaagtttcgggggctgctttgcatcgtattctgttggaacatattaataatggtgagaactctattatctccaataccaagaaaaatttggaagatttgaccttggatgatatcattgatgcggtaaataaggaagatttgctgtgtattgaactggtggaagaaattggagtgaaattaggccgccatgtagcgggacttattaatatattcaatccggagctagtcattattggtggtgcattgtcacgtacaggtgattatttgacacaacccatcactacagctattcgaaaatatacactgaacttgatgaaccgtgattctgttattgtagaatctaaattgaaagaaagagccgggattatcggtgcctgtatgttgtcgcgcagtaaactgtttgaataatatgtaggtattataaagtaagggatgagtccattacatgattcatctcttatattgccttcttgttaagtttaactctgagcaagctcaataagtttttaaggagctagtattatggttgatagaacacatgatgaaactaaactttgggaatctttcattaaaggagaaacggcggcatttgaagaagtttatcgacgctattattcgttattgtattcctatggaattcgtatggtaggtgacagagagctggttgccgataccatacagaatctgttcgtcaagttgattttaaattgtaggaatttgcattatactgataatgtaaaggcgtatttgctttgttcttttagaaataaattgctggatgcgtttcagtctttacgtccaatggaagtgattgaagaatgccatgagttttttccgatgggtgaagaaataataaattctttatttaagaaagatgatgtggatgtgaagaatgaaaggaggctggctaaggcaatttcacgtctttctggtcgtcagcgtgaaattctgtatttatattatgtaaaggaattgagccatcaggaaatatccgctatcttaggtatgaatcctcaatcaagcaagaatcttttgtcgcgtacattggcacgtttgcgtgaattctttttctctgtttcaaccatttggattttcagtatcttggtgcattgtgttcatgtgcctgtgcgtagtgtttgggcttttcacttctcttgatttagcgagtagttaattgttgttgttttatcatttgggcatgttttcatgaagtgatatttgtgtgatgaataagtttttttatttgtcatataaggtttatctattggtcttacgaagactcatgcaaagaaaagtgtgatttcttttcttttttatgagtaccttttttatcgagtgccgttttcttaataaaaaggtatttcgatgaaaaataaaaaaacaatatataattcagatgaatttcgtaaaacagttcgatgcctgactgagaagattcgggaagcagatgaattggaatttgttgatgtggaaaaatcttttcaggacgtgatgaaacgagtagaaagggaaaagagggtttcctacagacgtcatatttataggtggtctttgtcgatagcggcagcgattggtttgattttagctatgaactggtggagtaccaatgctgatgagggtacggagcttgatatagcattgctgaatgacacgacttccatttgcggtgatgaggtgattctgataacagataaccaagctatgaatctgaaaaatgatgcttctttaaaatatgatactttaggaagttcgaatattcagcagtatgcattaaatactaaaatatcccaggcttcatctgtaaagaatgaaatgcaccagataatggttcctaatgggaaaagagctgatattactttttctgatggtactagaatttatataaattcaggtagtaaagtgatatatccggatatttttgaagaacagaaacgtgaaatcctggtagagggggaggtttatctggatgtagccaaaaggaaggattgcccatttgttgtcaaaacaagagagtttgatatacgcgtactgggtacttcgtttaatgtctgtgcctatagggaagatgaggcttcatctgttgttttagtacatggaagcgtggaagtaactactgagaataagagcaaagtaagattagcacctaatcaattggtggatattaaaggtaataaaacgcaggtacgtaaggttgatgtgtccgaatacatcagttggaaggataatttattgctgcttcatcaaagacccgtaggagatgttttgaagaaacttgagcggtattatgggtgtaaaatacggtatgatgcggagattactaccttgtcattgtcaggaaaactggatcttcaaacagacattaccgatgttatggataatttatgtctttcattatcattgcattatacaataaatgataaagatgaaatctatgtgagccttaaatgagaattgttgaaccttaaaacactttagcctatggaataaaagaagaatgtaaaaaaaagaaaaccagacagtatttgccgtactatctggtcactgaatcgttgtttaattatttaccttgaaataaatagaaaaaacaatcaaatatatgaaaaaatacacgaatagaataaaactcatgcctaaattcacaaaatgtatgagtttagccatgattttaacatttacaagttatgaagaggcttttgcggaaatgagttatgcggaacaaactagctttaccgtttctatggagaaccagactttgaagagtgtgattaattgggtagaaaagaatagtcaatttatttttatatatcgtacagatattgatttgtctcgtcgtgtcaatgtggatgtacggaataagacaatagaggaggtactgaaacaaatgtttgccggtactgatttggaatatcatatccgtgacagacaagtaataattcgtaaggccatttctagagaaaaaacgcctcccattgttatgcaacaagagaaagtgactgtcaaaggtatagtgaccgatgccaaaggagaagcaattattggggctaatattatagagaaaggtactaccaatggtaccataactgatatagacggccagtttacgttaatggtaagtgaaaaagcgtctttggtcttttcttatatcggttatctgactcaagaaatggttgtagggaaaaagccgtttttgaatgttcaactgcaggaagacaataagactttggatgaagtggtgataacaggttatgggggcacacaacttcgttccaagatgactaattctattgctaaagttgataattctactttaagtacgggtgcccatactaatccggcgcaagcactgtctggtgcagtggcaggattaagggtgcagcaaactagtggtaatccgaattccactcctactttggtacttcgtggtggtaccaatctggatggtagcggttcacctttggttattatcgatggtgctgtacgcgagtcgttgagtgatgtgaatccggaggatatcgagtctttggaggtcatgaaagatgctggtgctacagctatttacggtgcgcgtgcttccaatggtgtaattcttgttactactaaaagaggttcggaaggacatacggaaataaatttgagtgcgaaagtcggtttcaattttttccatagccagtatgagtttttgaatgctcatgattatttgtattatatgcgttcagcattttatcggtcttcgcatatatggcaggataaatcgggcgcttggcatggatttgccagtgatgcgactttatccggaacacagccttacggaacaggaaacagatattttgatgaaaaagggaatgtacttaatggcaataaagacaatacagccgtatggggtgttatgaattatacagatgatctggctttcctgttaaaacagggttggcagacaatggatgacccggtgaatccgggacaaaaattgatttattgtgataatcagctgaaagattataatatcaaatctccggctattactcaggattataacttgagcgtatccggcggcaatgataagggacattattatgcaagcctaggctataatcgcagcgaaggaaatgcgatgaacaactggtatcaccgtttgaatttcacgatcaatgcagattataaaattaagccttggcttacttctaattcttctttgacatttaccgatgcaaaatgggacgatggtggtgcaggatatgccggtgaaggtgattttttcagtactaccttgtccgttcctcctacattccgtgtgaaaagtccggatggcgattggttggcaggccctgccgtggcttcttatgcccgtggctggaccacagtgaaagtgtatgaggatgcattgaactatgataataatacagacaagtttaatttgagtcagtcttttacctttaatataatgaaagggttgacattcaagaccacaggaacttggttttattttgatgacagcagagagttcttcaaaggggactatattgtagctacaggaccggtgtatgacactaatcatagtacttccaacaagcatgaacgacttttggaccagacttacaatggaatcttgaattatcagactacattccggcaagatcattctatagatgcgatggcaggcgtagaatattatgactcatacaagaaaggtttttcggcgtccggttatggatctccattatctgattttcaggatttgaattatacttcgactgctgccggagtgcggcaaatagattcctggcattacagacaacgcattctttcattctttggtagagtgaattatgattataagtctaagtatttgctgagccttgttttacgtcgcgatggatactccaagctgccaaaagataaccgttggggaacctttcccggtatatcagccggttgggtattgagtagagagaattttatggagtcttgtagcaatgtactttcttatgctaaaattcgtgctagttacggtgccaatggaaatgtgtctggtgtactggatgctaatggtaatgtagtgacaggacttgattattatacggttcaaggctcttatggtattatgaaagataaagatggtaaaatagtacccaactataatggcaaagttcctttgatgataaacgatttgcctaatcccaccatgagatgggaaaaatcgtacacattcgagacaggtttcgatattggttttctgaataacaaatatatcttgaacttcacctattataatagacgtacacaggataaatttgcagaaatcaccctgccttcccatagcggagtttcttctttcctttctaacaatggagaagtacaaaaccaaggtatggagttagaactgactgccaatgttttgcgtaccaaagattggaaatttacagttagtatgaatactgcttataataagaataagattatctcattaccgtacaatggattgccgaataatatgcaggatgcctatcaggtttatacgggacgcaagctggcagatggtacctatgaaagacaatgggtgggtggttatcaggaaggacaggaatatggtgtgatttacgcctttaaatctcttggtatttataagagtgagagtgagattccaggtaatctgatagacagatccacttatacggaaaatggagcagatgccaaagtgctctatggacctgaagcttgggctaaattgtcggatgccgaaaaggagaaaggactgcctatacaggctggtgatgtgaaatggcaggatgtgaatggggatggtgtaattgatgattatgaccgggtgaaattgggtaatacgatacctcattggaccggaggctttaacattaatacttcatggaaaggattaactttgaactgccgtctggattatgctttaggctattgggtgcatgattggaaaactccttggattatgggtaatatgcagggaacatttaataccatatctttggttaaagattcctggtcggaaagtaatccgaatggaaaatatccggtgtatggatgggctgactttttaggcaaacgtaattatgacagaatatcagacattaattgttatcgtggcgattatttggcttttcgtgaaataagcctgtcgtattccttgcctcagagttggattcataaatccggtttgagcaaggtggatgtttctgtaacagcacagaatttgggatatattacagcagccaaaaatatggcgacccccgaatatggtgtcagtcagaatggaggatatcccctccctagaacagttgttttgggtttaaatgttacattctaataaataggaaggattatgaagaaaatattttatagcatattgttgagtgggatgatggtattgtctgcttgtgatgcgttggacctgtctcctgaagattattatggctctaatgatttttggaatcagaaatctcaggtagaaatgtttatgactggtattcatgccgatttaagagataaatatcagatgcctgtcacattgggagagttcagaagtgagattctgataagtgatgttacttctatgggtgagggggtatatggtccgcctatgactaataatctgcttacgaaagataataccggtgtcgatgattggtatgaggtgtacccaaatatcatgcatataaatttgtttatcagaaatgtagataaagaaattgattatatgactggaatggagaaatcattttatttgggacaggcttatggcttgcgtgcatattactatttctatctttatcgaacatttggtggtgtgccgttagagacggaaccgaaagttaccgagggtagcattgatattacgcaattatataaggctcgttctactccggaggaaacgttagagtttatcaaagaagatattaataaatccgaagctttcttcaatgagtcggataagaagatgtccgaccaatatgaatggtcttattatgcaacggaacttttgaaggccaagatatatatgtggtctgccaaagtcactacaggattacccgatgatgatattgcaggggatcatatagctactctgactgccgtagatcctaataacagtgacttgttgacagcaaagaaggctttattgaatttggtgaaccaacaattcgaactgcttccaaactttgcggatttatggactccggaagggaagaagaataaagagattattttcgctctgtgttttaataagaatgaattgaccaattggggggcgaactggttctataatgtagccttgtttaccaatgctacggacttggatggaaataaatatggtccggatccgttgaagctattgacagccggaccattacgttatgagtataaagtgccgtttatcgagatttatgataaggaagatactcgtttggatgctactttctttcaatatatgttcgaaggaaagactcgtggcgcttgttggaaaaaactgatgggacatacggatggaggaactcattattatgattcagatgtaccggtatatagatatgctgatgttttgttgatgctggccgagtgtgaaaacgggttgggagctccggataaatgtgctgcatatataaatgaggtacgtaagcgtgcttatggtgataaatttgaacaacataaatatatcgcaggagattatgcggataatgagtgggctattttgcaggaacgtgataaagagtttgtaggtgagggaagccgctggtttgatttattgcgtttacgtgattccaacggaaaaccttttgtcttttctgttaaagcgcattatggaagttcattgcctatattaacagaggataaggcgtatatgatgttgtggcctgttaatgtggaagttttgaatggagatccggaaatcaagcagactccggggtatgaataatagtgagataatatgatgataatgaaaagattgctctttttagtatctgtatgcagcttatgtatggttggtaattctcagaattaccaacctgagaagcatgcagttgtgaaatcagatcgtggggatggacggttactaagtacttatgccattgtgcatgagatgttgaaagatacacatccccaatatgcttaccgttccggtatgtccgcacaggattttacgcaatggcaggatggagtgcgtgctgcaatggtggagatcatgaagtttcccgagataaagggacaaccgtctcctgtctgtgtgaaaacggaaaaaaaagagggatatattttagagaaatgggagttctatccttttccaaagtcagtttccacttttctggttttgaaaccggaacatttgaagggtgcagtacccggagtcttgtgcattccgggttccggaaggaccaaagaaggattggccggtgagcccggcatctgtgataagttaactgaggattataataatcccaaagtaagtatggctttgaatatggttaaagaaggttatgtggcggtagcggtggataatgccgctgccggagaagcctccgatttggaatgttatgataaaggatggaattatgactatgatgttgtttcccgttttttgcttgaactgggatggagttggctagggtatacttcttatctggatatgcaagtgctgaattggatgaaagaccagtcttatatccgaaaggacaggattgtgattagcggattctcattaggtacagaaccgatgatggtcttgggggtgttggataaggacatttatgcttttgtgtacaatgattttctatgccagactcaagaacgtgccgttgtgatgactaaacctgacaaggaaaacaggcgtccttttccaaattctatccgtcatctgatacctggttattggaggtattttaattttccagatgttgttgcgtcattagctcctcgtcctatcatttttacagagggagggttggaccgtgatttccgtttggtgcaatctgcttatgctgctagtggaaaaccggaaaatgcggagtttcatcattatccgaagtttgctgataaggcagttagaaaagatgtggagcaccttgatgaaggactggattcaaagacctatttcgaaacggtcaatgtagatcccccttctcattattttaaaaacgaactggttattccttggttacgcaaagttttaaagtaggttcaggtattttgataggctgtgattttttatataatatgggctccttgtttttcatctaggtgaaagcaaggagctcttttttattgattgtgaagaattcttgcaaaatttaatcttgttttaatgcagattgtagtgtttcccaatttttattgaagtcgggcatggaatgaaaaagtaaattcgctccttcattcagtaatacattgtcgtgcaatggtcctgtattcacggcgatagtaaaaataccggcggcaactcccgcctgtacacctagtggtgcattttctattactaacgcttcattgggtttgaagccgcctttctttagggctatcagatacggttccggatttggtttcccatatttcacatcaaaggcggtaaccattaagtctgcttggaagatgcccggaaaattatgatttaaccggtctaataacgaagtttgtcccgaaccggtcactaccatcggagtcagtccttcgctctttattttagtcaatacttccagtgcgccgggcattcgttctgctttggggcatttgttgaattcttcagttttggcttggtagatggcttttatttcttcttctgtagcatcatgcccacgctcccggcgacttactatattgatcgtagatgcaccggtacgcccttcgtgcatataagcttcttctcggctgaggccgaaaccgaagcgtttcattattttatgccatgcttcagcatggttgggcatggagtcgaacagcactccgtccatatcgaataatacggctttcaggtcgatggattcgtatccatgagcatgaagatagttatttatcgcttctttaaacatagaataaatgtataattattacttccaacggttgtgaccgttggattggaacaaagtgaagaatctgcaagcacttggtggatgctttcagattcttcactgtcattcagaatgacattgataaatggcattctttataggttcttgacgattataatctagcttggatggctttagactcttcttcgtatcccggtttgttcaacaaagcaaacatatttttcttgtatgcttccacgcccggttggttgaacggatttactcccagcaaataaccgctgataccacaagctttttcaaagaaatagatgatttctcccagatagtattcattcagctcgggcacaatcagtcgcatattgggtacaccaccgtcaacgtgtgccagctgagttcccagttctgccatcttgttcacttcgtccacacgctttcctgccaggaaattcaagccatccaaattttcgctgtccgaaggaacttgaagtgtatgttccggcttttcgatagagataactgtttcgaagatagtacgttcaccttcctgaatccactgtcccatagaatggaggtcggtagagaagtcgacggcagacggataaatacctttaccgtccttgccttcggattcaccgtacaattgtttccaccattcgttcatatagtgcagtttgggattgaagtttaccaaaatctcaatcttcttgccgtttttatacaattcattgcgggtagcggcataaacggcagcagggttttcggcaaacggagtagccggcccacatactgtttccattgtgcgtgcgccttccactaatttttcgatgtcgaaacctgccactgcgataggcaacaaacctaccggagtcaagacagagaaacggccacctacattatcggggataatgaaagtctgatatccttctttatctgctgtaacacgtgcagcacctttcttggcatctgtaacggcaacaatcactttcttcgccatttcctttccaagctggtcttcacactgttttttcagcaaacggaaagccaaagcggtttccgtagtagtaccagatttggaaatattaattacaccgaactttttacctttcaggtattcagttaattcgaacaaataatcttcgccgatattgtggcctgcaaatacgatgacgggtccgtcttgttttgctttcaaccattggaaactattggataaagcttcgattacggcccgtgctcccagatagcttccaccgatacctgctactactactacttcacagttgtcgcgcagaacctgggcagtagctttcaagtcagccaaatgttcggctgttatagacgatggcaagtgcaaccaacccaagaagtcattacctttacctgtaccgttttccaatgtttccatgcaggctttcacctgaggttcgtaagcagcgattgtttccttagaagcaaaaccggctactttgtcgatgtttaaactaatattcttcattgtatctgatattttatctgaatgaatcagttaataatttaatctcaatcatgggcgagatgcgctcatataaaatattatatacggcatctacgataggcatgttcacgtgcaagtgcttgtttaactccttgatacatttcgttccgtagtatccttcggcaatcatttccatttctatctgtgcgctttttacggaataacctttaccaatcatggtcccgaatacgcggttccggctgaaattggaataagacgttaccaacaggtcacccagataggcggaatcgtcaatagaacgttctacgggatgtacggtattcaggaagcggttcatttcctgaatggcattcgatattaatacggcctggaagttgtctccatatttcagaccgctgcaaattccggcggcgatggcataaatattcttcaacacagaagcatattctatacctgccacatccgggcttacagaagtttttatataatgtccggccagttggcgggcaaatattttcgccttgtcaatgtctttacatccgatagtaaggtaagaaagacgctccaaggctacttcctctgcatggcacggaccggcgatgacggctatattctcttcgggaacaccgtatacctggtgaaaataatcggaaacaatcaggttctcgtcaggaacgatacctttgatagcagtgacaatgaacttgtcctttattttggttttcagctttttcaggtggcttttcagataaggagagggggtaacaaatatcagagtatctgattcctttaccaccttattaatatctgatgaaaagttgatgttctttatatcaaagcgcacacttgtcagataagccggattatgtcccaaacgcttgaattcttcgattcggtcatcgcggcgcatataccagttgattgagtcagcctgagccaggactatttttgcaatagccgtggcccagctgccaccacccattatcgctattttaccgggcaatttcatgcttattatttatgatggataattgacaattggaataattctcaatctttaaattctcaattctcaattttcgcaatccatccggcaacttcgtccaccgtaggattggtcagttccaatttatattttttgttgattccgcaaatgtccatatgcaacttctgcggattcacttctttcatatcgctcaccaggttatagcctgctttctgaatgacaggaacccagtcttctgaaattcccaattccataaatttggcaggagtgtctttcggagtaaccttttcgggacgcatctgggggaagaacaatacttcctgaatggtagactgcccggtcatcagcatcgtcagacggtccataccgatacccatccccgaagtggggggcataccatattccaacgcacggacaaagtccttgtcaataatcatcgcttcgtcatctcccttttcgctcagtctcatttgttcttcgaagcgttccaactgatcaatcgggtcgttcagttcagagtatgcgttacacagttccttgccgtttaccatcagttcgaagcgctctgtcaaatccggattgctgcggtgtatttttgtcagcggagacatttctttcggatagtcggtgatgaaagtaggctggatgtaagtaccttcacagaattctccgaagatttcatcaatcagcttgcctttacccattgtattgtcaatttccatgttcagtttctgacaaacttcgcgtatctgttcttcgttcatgcctgtcaggtcatagccggtgtgttccttgatggaatccagcatagtgacacgcttgtacggggctttgaaatcaataatgttgtcgcctacctttacctgagtggttccatttacatccagacagattttttcaatcatcttttctgtaaactccatcatccagttatagtctttgtaggcaacatatatttccatgcaggtgaattccggattgtgtgtgcggtccattccttcgttacggaagttcttgcctatttcatacacaccttcgaaaccacctacgataagtcttttcaagtacaattcgctggcgatgcgcatatacagcggcatgtccagtgcgttgtgatgagtaatgaacggacgtgcggctgctccgccggcaatggattgcagaatcggagtttccacttccatataaccttttgagttgaaatattcacgcatagagctgaataccttgctgcgtttgatgaagatgtcttttacctcctcgtttacggctaaatccacataacgctggcggtaacgcagttcgggatcttcaaacttatcgtaagcgaccccatccttatattttacaataggaagtggtttgatagacttggacagtacggtcagttttttagcgtggatactgatttcacccatctgggttctgaatacgaatccttctataccaacgaagtcaccaaggtccagcagacgtttgaacactgtgttgtacaattctttattttcatccggacagatgtcgtcacgagtgatatatacctggatacggccttttgagtcttgtaattcgatgaatgaagctttacccatcacacggcggctcatcatacgtccggctaccgatactttgcgaggttcctcatcatctttgaactcagcttttatatctgtagaaaatgcattggttacatactcagctgcggggtatggttcgatgcccatagcgcgcaattcattcagactgtttcgtctgataatctcctgttcacttagttctaatacgttcatcctgttaaaacattaactcaatttgttggcaaaagtacgaaagattttgcaaagtacctcattaagacgtgtttttatttcgataaagcctgttcttgagctagttcgcacaccatagatatcatgaacagcacaccgattgcaccgcaagcaataattaaggcgagattaatcatacgggcacggaaaagggtagaagtatgcagatgggaagctgtgtattctttaaagaacagataaagtcctggtacagccgaacttgccagcagaaaatcttcgggaatatggaaaaagtaagttttggtgaaaccgatcagcgcccagtggcagagaaacatgacgagaaagatattgactcgtttggaaaatgccagcagcagtccgatggtgaaaaccgctaccgaacaaggcattacaggtgaggtcatcatgggaaagctcatcccccttataatggagaagagtggataggccagtggcaacatacaaagcaggacggctagtgcggtatgtttgtgagtctgatcaaaaggggtgtagtttactttcaggtcataaatccagaagatggccatgattccccaaaatcctgccaaagcactgttataacttcttggttcacaataaatcatgtaatacacggcagctatccatacattcaagaatataaggtataacttcattgctacctttattttttttgtaggttttttgaatagagaacaggttaaaataatgccgataagggtaataataacttgataaatccacgtacccgcattataatgagtgattgtatcccaaaaaatattcatcttcttgataagttggtagttattttgggtggcaaaattacgaaaaaatgatggaatagcctatctttgtagcgaatatataaaaatagagaataacgatgaagaagtttatgagtctgatgttgctggtttgcgcatgtttgctgagccagccggtgaaggcacaacaggttactcctgataatgctggttatatagtaaaggtaggggatatggctcccgattttgaaatggagctgacagacggacagaaagtaaaactctctgatttgcgtggcaaggtagtgatgcttcagttcactgccagttggtgtggagtttgccgaaaggagatgccttttattgaaaaagatatctggttgaaacataaggataataaagcgtttgctctctttggagtggatcgggacgaacctttggaaactgtagtggcttttgccaaacgtaccggcgtgacctatccgttggcccttgatccgggggctgatatttttgccagatatgcggatcgtaaggcgggtatcacccgtaatgtgttgattgacaaagcgggcaagattgtcatgctgacccgtttgtacaatgaagaggaattttcttctttgtgcaagaagatagatgaaatgttgggagaaaaataacaggcaatgagggtatcggtactatttgttacatttttattttttgttctatcaccgcttctggcaaagaaaaagcctcgtaccggcaaggagtctttatttggaaaggagtatgccacctatcagattacatctaatgaattaagcggagcttgtttttatttggtgagtgggcacggaggtcctgatcctggggccatcggtatctatcaggggcgtcagttgcatgaggatgagtatgcatacgatattattctgcggttggcacgtgagttgttgtcacgcggtgcgaaggtacatattatcattcaagataagaaggatggtattcgtgacggtcatgtcctggcaaacagtaagcgtgaaacttgcatgggagaccctattcccttgaatcaggtggctcgtttgaagcaacgttgtgactgggtgaataaactatatcggaaggataagagcaattacaaacgagctgtatttattcatgtggacagtcgcagccaaggacagcagacggatgtgtttttttataacgctcctaagagtataaagggcaagcggttggccaacaacttgcaccgtacctttgataagaaatatgataagcatcagccaaaccgtggttttcgcgggacggtgagtgaacgtaatttgtatgtattgcgtaatactactcctgtagcggtgtttctggaattgggaaatatccggaacaagcgtgaccaacagcggctggttctgaagaataaccgtcaggcattggcaaattggattgcggagggaatagtgaaagattataagcaaggcaaataaagtagaggcagcagatggtctgttgttttgccagttttgttgatggttgggcaagttataatcggcagaatgtgacaagttgttcgagtttgtggaatttcgaaatcaagccttgaataccaaagtagtgaaataaagaaagggagtgacttttgaagatcactcccttttcttttacttgatttcaatttcctctttcatgtctatctcctcaccgtgaacatcggtgaaccgatattgcaggaaggccagactttggtcggggataatctttattccgaatccgtacttcatttgccatttgtgcttcagggaaaccagtccctggttcacgtatgctgcgatgtacggatggatgtacagcgtaaatctctttatcttcaatttgttgactaggtaatcaatcttactctccaaagtatccgtgaaaaggatggatggctttatgctacctttcccgaagcaggtggggcaggtttcattggtgttgacatccatggcaggacgcacgcgttggcgggtaatttgcatcaatccaaatttactgaggggcagaatgttatgttttgctctgtctttctgcatgttttggcacatacgttcgtacagtttctgccggttctctgctagattcatgtcaatgaagtcaaccacgataatgccacccatatcacgcaatcttaactggcgtgccagttcgtcggcggcacccaggtttacatccagtgcgttagcctcctgcccgttggcagatttggagcggtttccgctattgacatccactacatgaagcgcttctgtgtgttcaataatcaggtaagctccactcttatacgaaatggtttttccgaaagaggatttgatttgtttggtaataccgaagttgtcgaatatgggaagctgacctttgtacagttttacgatttcggcccgttcaggggcgataagtgatacataatccttaatctcatggaacaccgtttcatcgttcacatagatgttctcataagacggattgaaaagatcgcgcaacatggctaccgtgcggctggtctcttcgtatactaatgccggcagtttgggagccttctgtactttagtgattgtttcttcccaatgtttcagcaagactttaagctctgcatcaagctcggccacccttttgccttccgctacggtgcgtacaatcactccgaagtttttcggtttgatgctttgcaataactgtttcagacgggcgcgttcttcgctcgatttaattttttgtgataccgaaaccttgtcgttgaaagggattaataccaaataacgtccggcgaatgacaattcgcaggttagtctgggccccttggtcgagataggttcctttacaatctgcacaataacttcctgaccttgctggagggtggttgaaaccgtcccttccttttcgatatcaggcagcatagtagcttttgtgatgggaaaaagttttttacggtcgcttaaaacttgcttcagatacttctgataagaatgaaattgaggacctaggtctagataatgaagaaaagcatctttttcaaagccgacatccacgaaacaggcattaaggccgggcatcagtttctttacccgtcccaaatacatatttcccacattgaaggaagcacttctcccttctttctgaaattccaccaacgctttatcttcaaggagtgcgatggaaatctctttgggttgtacgtctactactagttcgcttgtcacttttgtattcttaaattgttcactttcctcattaaacaaagaacaaacccgaaagacttttgttgctttgcaaggtttgttctttatttgtcgtcacagacagactacaaattattttttgcttttatgtctgttctttcttagtctttttttacgcttgtgagtagacattttgtgtcttttcttcttctttccgcttggcatagcttcaaattttatgggttaatactcttgtttattatttctttactgataatgtaaatgtcttagctggtttaaatgccggaatattgtgctccggaataatgattgtagtgttctttgaaatattgcgagcagtcttctgagctcttttctttactacaaaacttccaaaaccacgcaggtacacattttcctctttagacaatgaatcctttactgtatccatgaaagcctcaagtgtggttaacactgtcaccttgtcaataccggtatttttcgtaatttcgtttacgatatctgctttagtcatttcgctaaataattattgttatacttatatcttaattttttggactgcaaatatatagcttttctccctctttaagaaatatattcagaataaatttcctaaaaaaagcatcttcttccattttcttggtttacttttgcggaaatattgcatagaatgtacttttatataatactgatatggagaattttagcagaaaattgatagattggtacagggaaaacggacgtgatttgccgtggagaaggacaaaaaatccttatttgatatggatttcggagattattctacaacaaacccgtgtggctcagggatatgattactatcaacgtttcgtgactcgttttcctgatgtgttcgcactggctgcagccgatgaggatgaggtgatgaaatattggcaggggctggggtactattctcgtgcgagaaatttgcatgctgcggccagaaggatggcagaggcaggagggtttcctgtaacatacgccggggtgcgtgctttgaaaggagtgggggaatatacggcggcagctatttgttcatttgcttacgatatgccatacgctgtggtggatggtaatgtgtaccgggtactgtcccgctggttgggcattgatactcccattgattcgacggaaggaaagaaactgtttgtccggattgccgatgagttgctggactgtgagtgtcccggtctctataaccaggctatcatggattttggagctttgcagtgtactccggtggcgcccgactgcttgttttgtccgctaagcgattcttgtgtggcgcgcctgaaggggattgccagctctttgcctgtgaagcaacataaaatcaaggtgaccaatcgttattttaattatatatatgtacgcatgggcgcgtatacctttatacataagcgcagcggaaatgatatatggaaaaatttgtatgaaccgcctttggtagaaacagatcgtgaatggacggaagaggaactgtatgcatcgccacagtttcgcgggatgctgtccgggggagaggagcccatagtgcggctggtgcggaaaggggtgaagcacgtgttgtcccaccgggtgatttacgcaaatttttatgaagtgattctccctgagaattcggcttcttttgcgaagtatcagagaataagcgtggaagatttgcataaatttgccgtatcgcgtttggtgaatcagtttttttcgctaattttggagcctaataattaaaaaggaataatagaatgtcagtaaataaagtcattttgattggaaatgtaggaaaggaccctgatgtgagatatttggataccggcattgccgttgccactttctcgttggctaccaccgatcgtgcctatacgttgcagaatggaacacaggttcccgaacgtacggaatggcataatatcgtgttatggagagggctggctcaaactgcggaaaaatatgtccgtaagggcgacaaactctacatagaaggaaaaatccgtagccgttcatacgatgatcagaatggcataaaacgcaccattgtcgagatttttgctgataatatggagatgttgaccccgcgtaacgcctcacagcaaccgggtacgggatatgtgcaggcacaagcggtatcccggcagcagatgtctgcacaagtagctccgcaacaacagcaaacttcggataatagcctgacagacgatttacctttttaagtaagagaacttgatgtttaactaaaaccagattccttggaccctgactcgtatttatgccgcttggcggatttatttgacggtgtaaccgtaacggctcctaccataggagccatcatagctatcttattagctgttttattgttgtatgcctcaggctttgtgtctgcttcggaaatagctttcttttccctttcacctgttgatttaagtgagatagaggaaggaaaacatacttcggacaggcgtatcagcgccctgctgaatgattccgaacgcttgttagcgactattcttatctctaataattttgtcaatgtaaccattatcatgctgtgcaattatttttttgccagcaccatacactttggaaattccgtgattctggaattcctgctaataacggttgtccttacttttctgctattgctttttggtgaaatcatgcctaaaatttattcggcacagaacacgttgaagttttgccgtaaggcagctcctgccatttcttttttaaagaaattcttttcacctttgtcggcattgctggtccgttcttcctttttggtgaacagatgtgtggcaaaaaggaattataatatttctgtcgacgagctttcacaggctttggaattgacggacaagagtgagatttcagaggaaagcaatattctagaaggtattatccgttttggtgaggaaacggccaaggaagtgatgacttcccggctggatatggtggacttggaaatcaataccccttattccgaagtgttgaaatgcattgtggaaaatgcctattcccgtattccggtatatgccgaatcgcgggataatataaaggggattctttacataaaggatttgcttcctcatttgggcaaaggcgacaactttcgttggcaaacattggtccgtcccgcttactttgtgcctgaaacaaagatgattgatgaccttttgcgtgattttcaggcaaacaagatccatattgccatcgttgtcgatgagtttggaggtacttcgggtattgttacaatggaggatatcatcgaggagattgtgggagagattaatgatgaatacgatgatgaagagcgtacgtatgtgaaactgaatgaccgtacctatatattcgaggcaaaaaccttactgtccgatttttataaaattatgaaagctgatcccgctcttttcgagaaagtggaaggagatgcggacactttggccggtttgttgctggaaataaaaggggagtttcctgtattgcacgagcggttggattacgggaattatcattttgaggtacttgaaatgaatacgcgccgcattttgaaagtaaaagttatcattgacccttcccactccatggaaatggaagaaggaaagaaatagattttatcatgcctttataccgtacttatagcgaaggggaatttctgcttggaatatggaagtctgatgaaacaacggaacaactgctggcatcgttggagcataaagactggtatagggagaaactggctgttttttccgaaaaacggaagcatgaatggttgtcggtacgtgtgctgctgaaggctttgtgtggagaagaaaaggagatagcttattactcttcgggaaggccttatctaaaggatggaagccggtatatcagcatctcgcatactcgcggttatgtagcggtggcgcttcattcttcctgtgaggtgggaatggatatagagcagtatggaaccagagtgcggaaagtagcttcccgttttattcgttccgatgaagagtccacaatgatggaaggagatgaagtttatgctttgttgctccattggtcggccaaggaggcactgttcaaactgatgggagtagaggaggtggatttcattcgtcatcttcgtatttttcctttcagcctgtcggaagagggggagttcgaggcatgcgaatatcgtacaggccggcagggacgttaccgggtccgttatgtcactcatcccgattttgtattgacttggattataaaataatgctcaggcgaatcacttcggctgagcattccaaataaacttggcagagtttactttaaaataaatgttctttttacctgatactcttttccggacagtgaaacggagaaaatagcggatgtgattaaaggcatcccttacgttcagtgttccaagctctttcctcgaaagcttcagatttgataaatgcacaggcaggtcttctgactcgtttccgctataagcaccttcccggaaattatcccagtggttattggcattttgcttatgcgtttagtgaaacatacagcagcgggactgttcaggattctcaccttgattcccttttaatcattcacctcggaggggagataaatgaaccgatgcaccgcaaagatacagtttatatttaagaaaacaattatctttctttattttttagagcctgtttaaattttgaagaaaatttagaaacaggtgcttgtcatcttctcattctttactcagtgtaaatatgaattccagacctccaccgggggtgttcttggcgaaaatggttcctccatgcagaatgacagcgtttttcacaatggccagtcccaggcctgtgccgcccagtttgcgtgaacgtcctttgtccacccggtagaaacgctcgaacaaacggcttagatgttcgggatctactcctacgcctgtgtccgagaaactgaaatagtaaaaacgttcgtcttcacggaaacagcggatggttacggaaatatgacttcctgcgtatgcaatggcgttgtccgtcagattccggaagatggaatatagcagggaagaattgccttgtacggtcagtctttcaggcagcatattgtgggcagtgatctgcttttcttccagttccaaagttacttcgttcaggatattccgcatcatggtggtgaggtttaccggttctgtctcgatcatgttcggagcttcttccatgcgggtaagtacggagatatcccgtaacagatgtgccagccggttactttgtgcatagcttctctccaaaaaagcattgattttctcacggggcagggtagggttgtttactatggtttccagatatccctgtatgctgcttacaggggttttcaattcgtgggcaatgttctgtgtcagctgttttttcagaagtgcttgctccttttcctgagtgatgtcattgatggagatttcaaagctgtcatcttgaaagataatgcactccacggcaaagatacgtccgtttttgtctatgtttaatgacatccgtttctctcctttgccgatactgcgttccttgttttttgtaatgaaacgggtgatgggctgcaattcggggatggagaagatttcttccgtagaactcagatttttgtctgagataaggttggcatattgtgtgaacaggttatttaccagaatctcttctttgcggtggttgaatacgcctaaaccttcgtgcgagatttggagatgggtgatcagtttctcgcgttcgatatataaatcttcttttgcctgatgcagacgtttgtaaatttggatgatatgttgggatatctcgcccagttcgtttttgggaaaggtatcctgcatatcagtgtctatcggttcattgcggtcggctttcatggcgaattgttgcaatttggtgatagacattcccaatttatgtgtgaaccggtagaatataattattaatatcaggctgattatcagtgtaaaccatacataatgggagtctgctttcaagtgtctcatcagactgacattatagggaagggccgaacgaatgatatagtccaggttaggataatacttggccgaatagaaaaattcaccgcccaggctttccgattgtctgttaatggaatagccgctgccataagtgatggcttcttttatttcctgacggttatggtggttctcgaagtggctgggatctttttccagattgtcataaattacagtaccattcttgttgatcagtgtcacacgtagatcttcaaaggtgtgttcgcatacatagtcgtccaattgttgaatattcagcgtatccctgccacggagaaaatcattcaggcggtcgttgtaattctggagttgtgtgttcagtagctctattttgtattccttctccctgcgatattggaatgccatgaaacagatggcgaatgctatgaataaggagattaccgacaagaatagtttcttgttgaatgacaggacgtggctggataattcaatagtcatggaaaggtacaggttaggttattcgcattcaaaacagtatccgtatcctaggcgggtgacgatgcattttccgtattcgcctattttcttacgcaggcgagtaatgttgacgtcaatggtacggtccagcacatagacttcctcttgccatactttagccagaatatcttcgcgtgagaatacgcgacctttgttttgtaacaacagcaacaggatttcgaattctttttttgtcagggaaatttctataccgtctatgctgactttcttcttggtgatgtcgactaaaagccctttgtattgcaattgttcctgcacttcttttccctgtgtgggactggtacgtcgaaggacagccttgacgcgtgctataacttcgcgcagtgaaaatggcttcgagatatagtcgtcggctcccaggttgaatcctgtcacagtatcgttttcagtatctttagcagtgatgaatataatgggaatagaagcggtagctttattctttttcagcatgttcgccattttgaatcctgaaatttctcccatcatcacatccagcaacagtaagtcgtattgggtcagttccatcttcagggcttcttcggcggagtttgctgtatccacaaaatacccttcgttttctaaattgaatttaagaatctcgcatagatcttcttcatcgtcaactactaaaatgcggtaatcgttcatatatccatctttttaatactacaaaactaatcttttctgatcagcattgcaaagatggagcatttttattactatttgatgaaacaaatattacaaaaagattacatgttataaaatcgttaagttttcatcgcagattacaccattttaatgattctgtaatcatcccgccggataataattggaacgcaataaattatgatttcgtaaactctccggctactggaatactcatttggtaacgtatttctctttcactttttccgtgtcccaaaaggaacatcagtttggttagaacggattccaccgtactgtcgtagccgctgatgacccctgcgtccagcagatggagtccggtttcatatcttcccatttccactgttccggtagagcattgggagatgttgacaatgatgattccccgtgaagtggcatcccttagaagttcgatgaaccatggcttttgcggagcgttgcccgaaccgtaggtttttaataccactgcgcgtaatcccggtgtatgcaggatattgctgatcatgttttcctggatgcccgggaaaagggtcagtataattacattggtatcataaagatagtgtggttttaatggcagattgggatcggctttgtgaatacggtcatattcatattttatgtggatgcctgctgtcgccagcgaagggaaattgtatgaacggaacgcattgaaattctccgcatttatttttgtggtacggtttccgcgcaacagatggttttcgaagaagatgcatacttcgggtacaatagcagtgccgttcggatgtttggcagcggctatttctatggaagtgatcagattttcctttccatcggtgcgcaacatgccgatgggcagctggctgccagtcaggataaccggcttgctcaggttttccagcatgaagctgagcgctgaagcggtgtatgccatggtgtctgtaccgtgcagaatgacgaacccgtcaaaattatcataattgtatttgatgatcttgactaacttggcccacaaggcaggttccatatccgaagagtcaatggggggattgaattggtaagaggagatgcgatagttgaaccgcttcaattcggggacattgtcttgtaactggtcgaaattaaaggcttctagtgcacctgtctcaggattttcaatcatgccgatcgtaccgcctgtgtatattagcaaaacggaaggatattcactctgtatcatgcgcttctcttgtttaattttggcacaaagatagtaattatgtataagtatggcaaaaataagaggggaaaataacaaaatgttttctctatggaccgaggccggttttcccggacagggtgggtggaagatatggaaagattacgtgtaagattatatatcttatgcttgtaagatatataatcttatgcctgtaaggtactgtatctttcgccctcatcgtactggtctttcaggtgaactttgaagaggagggcattatgagtgaatgccgtaaacgcagatgcagacgcagcagacgcaggcccttttttctcacacacgtgcgcgtataatacaaggtggggaaatagaataaactaccgtaaggtggaagaccctatttaagagaaaatgaactttgaatctgaaacttgtactttcaaccgacaataaaagagtcgtattcactctatatttgaataaggatacaactctttttatgttgttcagttataatctgtatctttttcagagcgttcatcttcgttttgacctccctctctgatgatagttaaaacaggttattaaaaatagatacacatttacatatataatgtacgcgcacgtgtgtgagaaaaaagggcctgcgtctgctgcgtctgcgtctgcgtttacgggttgtggaagattagtttttcaaagcttccagcagcttgtccgccgctttttccgcatttccgttttcctcgtccaataaggtcacgaatttactgccgatgatagctcctgcggcatgagcagatgcagcctcgaaggtttgtttattggaaattccgaaacctatcatacggggattgcgtaaattcatgtcggcgatacgttggaaataggcttgtttctgtgcgttgaaatctttttgagcaccggtgatagcggcggaagacaccatatagataaagccgtcggtgtgttcatcaatcaggcggatacgctcttcactggtttccggagtaatgagcataatgattttcactccctgtttctcggctatggaacgatactcttccatataatctttgaaaggcaagtcgggaataatcactccgtcgattccggtctcccggcaggtgcggcagaaattctcaaagccatattgcataatcggattgaggtatcccatcagcaccagcggaatctgtacctctttgcggatctctttcagttggtcgaaaagcagcttcagtgtcataccgttcttcaaggcgcgggtggcggcgtgttgtataaccggtccgtcggccatcgggtcgctgaatggaataccgatttcaatcatgttaatcccttttttctccaaggctttgatggtgcttgccgtaccttctaaagtaggaaagcctgcgcaaaaataaatagagaggatatctttttgcttggtactgaataattggttgattctgttcattgtattttttgttttaattggtttataaatgtatggacggcggcggagtctttcaaccccggagcagtctcgaaaccgctgttcaggtcgatacccgcccactgttcatgtttgaactgcaacagagaggaaaggctgccgggacggaggccgccactcagcaggaaaggagtctttgcctgataggcctgcaggatatcccagtggaaggttttgccggaaccgccatatccggaacaagcagtgtcgaaaagaaagtaatcgcaaatgccctcataacagccgacgggccgcaggtcactttcccgtgcaatggaaaacaccttaacgattcctaatccggcggtttttaatttgcggcattgttccggtgtctctctgccatgcagttggatatagtgcaggccgaattcctgtgctttcagcaagatattctcggtgctctcgttgacaaagaccccgactcggcggcattgttccggcaggtattccggacaatgcgtcacgtaacgggcggaatggggaaagaaaatgaatcccatccagtctgctccggcttgctctatggcgcgtatgttttcgggctcgcgcataccgcatactttgacaatcatggttgctgttttctttattcaccacagattacacggattacacagattaaccttcgatttaataatctgtgtaatctgtggtgaatattaacatacttctagttgggttataaattcttttaaagcttctcccggctcgggtgttttcataaagttttcccctatcaggaaaccacggaaaccggcagcccgaagttgttttaccgtttcggggctggagataccgctttcagagacccagagcatttctttgggtagtttttccgccagatggaaagagttctccacatcggtgtgaaaagtgcccagattacggttgtttacgcctaccatgtcgatgttctcgtttacatactccagttcttgctcgttatgtatttccaataggacttccagttccagttcatgagctttgaccgccagggctttgcattgctctttcttcaaagcggcggctataagaaggatagcgtccgctcctacgatgcgtgcctgataaagttggtattcatctataatgaaatctttccttagaatgggaagttgcacgtgggggcgtgccgaacggatatctttcagagtgccgccgaagtatttttcatcggtgaggatggaaagtgcggaggctccggccgcctcgtaagcgggaggaatagtatctgcctgtgcgtcttcttttatccatcctttggagggggagcgacgcttgaactcggagatgatgccgtaaggagaagaggcaagactggcacgcatactgatacgtggcatgggttcgttacaattgtttatcagcatttctttgctgatggcagccttttgcagttcgatctcgatctgcttgcaggcgatgatttctgttaatatatctgtcattgtatgaggcgtttggtagtggaatactgggtgtgtaatcaactgttcagttccacaaattttttcaatgtattcaatgcttttccgctttccaatgattcacgggcgatggccacgcattcttctatcggtttggccggttccatggcttgtatggcaaaagaagcattaatcagcacacagtctgtctgggctttggtggctttgttctccagtacgttattgaagatttttgacgcttcttcgggagtgttcccaccataaagctcttcttgtctggcaagggagaaacccagttcggatggcttgtagatggtttcgtagcgattggtcatcactttgaattcatcggtcagtgagatttcgtcgtaaccgtccaggttgtttactacggcaaagccaatgcctagtttctggaatacgttggtgtaaaggcgcatttgcggcagatcggcgacccctagaagttggtaagccggaagacatggattaaccagcggacctagcaggttgaatatggtacgtacttgcagtgctttgcggacagggcctacacttttcatggcaggattgaacaactgggcatgcatatagaccattccacattcttccatagaacgggtcagcttatccggattattagtgaattttacgccgtgttgttcgatgacattgctggctccgctgacggaagtcgcgccatagttgccatgtttggcaacatgatatccggctcccgctacaatgaagcaggcgcaagtagagatgttgaaggtattttttccatcaccgcctgtacctacaatatcaataggggtgtaagcggaaaagtctataggtatgcgggtggtgagcaatgcttcacggaaacctatcaattcttctactttgatgccgcgcatttggaaaacggtcagcagagcggctatctgtgcgtcgttatacattccccgggttatgttgagcagcaaattctttgcttcttttcgggtcagttcctcgtgattgaagaggcgggataatatagctttcatatttattatgtacggtttggtttatgcgtttagaaagttggctatcatggttttaccatcgggggttagtacggattcgggatgaaactggatgccgtggatatcgtattctttatgtttcaatgccataacgagaccttcccggcttactgcggttatttcaaggcactcagggaaaccgtccgtatctaccacccatgagtgataacgtcctaccggcacttcatccggcagtccgttgaaaatgtaatcggttttctctcctttgtcttttaattgattctttttaattgagatgggggtctgtacgccatgaaatacttcgctcagattggtcagtttgccgccaaaagcttctcctatggcctgttctcccaagcatacacccagaatcggtttcttgccggcatatcttttaattacttcgagcagcaggcctgcttctgatggaataccgggaccgggtgaaagaatgattttatcgaatttttccaattcttccagttggaaagcatcattacgtaatacggtaacttcggctcccagttcttttaccaaatgactcaagttgtaggtaaatgagtcatagttgtctataattactgttttcatgatgattcgtttttacatttgttctgccaggatgattgcttttttaagtgctcccagtttgttgtttacttcttgtaactcgtactcttcattgctcttagctacgatgccgccaccggcttgaaaccatagttcgttgttgcggctgacgaatgtacgaatggtaatagcttggttcaatgtgccgttcagcccgataaatccgatgcaacctccataggctccacggctgtgaggttcgtattcgctgatcagttgcatggcttttaccttcggagcgccactcagagttccggccgggaaagtatcaataaatgctttgatgggattggctttggggttcagttcgccactgacccggcttaccagatgaatgacgtggctgtaatattgagcttctttgtaaaattctacttgtacatcgtgacaattgcggctcaagtcattgcgtgccagatctaccagcattacgtgttctgcattttctttgggatcagccaataggttggcggtgagttcagcatctattttcttgtctccgttgcggcgggtggttccggcgatagggtcgatggtggcacgtccgttttctattttacagtgggtctcgggagaggaaccgaaaatacggaagcccccgaaatcgaagtaaaataagtagggggacgggttgatgctgcgtaaagcacggtaaagtttgaaatcatctccttcgtaacgttggataaaacggcgtgaaaggacgatttggaaaacatcaccgcgcatacagtgggcaatgcctttgcggatgttcgccttatgctcttcatcggtcagggtgctggtagtttcgcccacggcacggaagtcgtaagtggtatagttacggttgtggattgctttttccacataatccagatggctgtcctcaccgtcctgcaacatttccagtaataacatttcattgcggaagtcattgaagacgatcaggtatttatataagatatacaacatatccggagcatcgttcttagggtcacggctgtcttttacattgatatgttcgaagtagcgtacggcattgaacgtggtataaccatacagtccgcagtagttgttgtattctccgcttaccttgaaacgattcagaaaatcggagatcgcatggtctgcccggaaatgttcggtgatgggatgttcttccatgctgccgtcagggtaggtggcagtggctatgccatggttgattccgatgctggctacaggattcagtccgatgaaagaacggttgttctcacttccatgatagtcggaactttccatcagcgcactctgtgggaaaatgtcgcgtactttcagataagtactgaccggtgtatgtaggtcacccagtatggttttgtatcgggtggtataggtaaaagttttcattgtttcttttctgtttatagttgtccgtataagatttttactctcgtgggtttctatgtgttattgcagggaggcccttgtgctggattctttcaagtaggtttcaatatccttatctccgcgtcctgatacggtgagaaccactatatccgttggcttgaatctcattttgtccagtgctcccaatgcatgagccgattccaatgcaggaataataccttccagccgggtcagttcaaatgcggcacggatggcttcatcatcgtttatggcgagtaccaaagcgcgttgctgtttggctagattggcatgcatggggcctatgcccggataatccagaccggcagagatggagtaaggttcctctatttgtccgtcctcgttttggataaccaaggtctttgctccgtggataattcccattttccccagttggatggtagcggccgagaaaccggtgtctatgcctttgcctcctgcttcggccaggacaatctgcacacgttcatcatctatatagtgataaatggttcctgccgcattgcttcctcctcctacacaagccatcaagtaatcgggatattcccttccttcctgttctttcagctgctttttgatttcttcgctgataacggattgcagacgtgccaccatatcagggtagggatgagggcctacggtagagccgatgacatagtaagtatctgcagggtggcaacaccaatcgcggatggcttcgtttgtagcatctttcagtgtcatgttgccggaagtgaccgggcggacttcggctcccagcattttcatcttttctacattgatatgctggcgttctacatcggtcttgcccatgtaaacaatgcattgcatgttcatcaaagcgcataccgtggcggtggccacaccatgctgtccagctccggtttctgcaatgatacgttttttccccatacgttttgccagtaacacctggccgatggcattgttgattttgtgtgctccggtgtggttcaaatcttcacgtttcaggtagattttacagccgtattgttcgcttagccggtttgccaggtatagaggtgaagggcgtcccacatagtcgtgtagtaactggtggaattcttttttgaatccttcactttccaatactttggaataggcattttttaactcttccacacagcgatgaaggatttcgggaatataggccccgccaaattcgccataataaccttctttgtttacctgataagttttcattgtcgttctatattaaattttgattgttaattgcactaacgaaaaaaggcctgtcgtaagtacgacaggccttcagtttgaatatccttattagaatgtcaggtatatatacatggtctggttcccttacgacttgtttagttgtaagaaacgccaccaatatgtatttaccatgattctattcataaaatctgtttttattttggggcaaatgtaagcgttttgttttaaactccaaagaaaaacttactttttttttatttatttgcagcctcgtgtattttccctttcacttcttccactttctcacctacttttccggctacttcactgcttacttgttctgctttatgttttgcatgatgagccaggtcttttgcatcttcttgtaagtcctgaatggcatcatacacgtctcttctcaatttgcggcctctgttgctgtgcgcaaaacaacttaatgcactgccgaccagcgctcctagtgccagtccggcaaagaattttccattattcataatcttattactttaaattggttttataaatgaacatttcgggtggcggaatggttttaatacatcagttaataaatcattaaaatgaagtgtatgaaacgtaaactttggataaggataggtgccgtgttgttggcaggattgctgttatggtggctcttttgggctattttgatcgatgaggacgagaatgaacaaagtctgcctgaaacagaacagatagagtaatttgccatatgataaaaggatgatcttcaggcatgggtacgaaagaacatattggaatagtcggtagaatattctgtttgctaaagtctatagaacaatagaatgtagttctaagcttatgacaggaaaatctgttccggctttcttcttttgttcttctgtctgaaaaattaatatccattttgcatctgtcttctcagaaataatcagtatattcgcttcattaaccaattagacatgattgaatatgaaaacaatgaattattctataatcagatgtatctgtgcattggtcatcggtgtgttgctggtggcatggcctgaagctgccattctttatctggttattacaatcggtgtcctgtttctagtaccgggactcttttctgtatttgggtatttgattcgtggcaagcaggatggcagcagtttccctattgccgggcttggtagccttttgttcggattatggttgatgattatgccggcattttttgtcggtattctgatgtatgtgctgggtgctgttttggtactggcgggaatcagtcagattgtgaatttgtctgctgcgcgtagttggacggtggtaccgggaggtttctttgtgatacctgtgttggtgctgattgcaggtattgtggtattatttaatccatttacggcggcggctgttccattcatcattctgggagtgagcagcattgtatacggactgtccgatttgataaacatcatccgcttccgtcagaagaaagaaccgggtatgcctgaaatagaggatattactcctatagaagagataaaagactaatccgattgatatgaaaatacgagggggctatattttatatcttttgattttatgtgcggttgtaggttgtaagggaacttcttcaccttccaccgcatccgaaacggataagtatgctgggacatgtgagggggaaaaagcgaaagctattttgtgggtggattataaaagaggacgtaagatagcggacgggactccgataagaacggtaaaagtctatgcggatgttcatgccgatggaagtctgaaagtgctttcttggtgtaaaaagcagccgatgaaggtagaaaattacttattgaaaagggtggcagtttaccggatcaggaaagaaatgttcgaaggggggtatctgaaaccgggagaacagtatttgcagttgcgctatctgccgggagaggtgaaataatatgttgtaggaagcattgaaattcgtagaaaaaggtttttgtttcttttatatttcgtatctttgtgtaacacaaattgttagaaatatgaagaaacaaatcttattgtcttgtgctcttgcctgggctgtgatggcaggtgctgaaacgattgacattactactttccgttatgccggaccctacattgtacaggctccttttcaggtagacagcgtggatgtgaattcaaagacttttgtatccggacgtttgttagatactcatctttctgtggacgtattgcagcagggaactttatttacaggcggagttttgccgggaagtgactcgggatatgccttgcacatggtgggctttgtgttggagaatactcgttatgctacggccaagttgaagattgacggtctggaaaaataccaactttatgtagatgggaaaaagcaggaagggactgaactcgctttggagccggccacccattctgtagttgttaaatatctttctgaaacagggaaaacagattccttgaaagtgagtgtggatacggatcaagagggaagcatttcacttaagcaagataacaaaaagctatatactttggcggatgtgttgcatggaactcgttttgccggagtaggactttctcctgatggcagatatctgattactaattatcgtacgacttgtgtaggtggccggtcggccggcagtacgcgtattactgaacttgccagcggtaaggttttggcggagcgtactgagaatatgcaatggatgcctcgttctaaccgttattattatacccgtacaggagtggatggcaggcagctgatagttgtggatccacttaccggagtggaggccgtgctggtgaataaattacctgacgggtatttccagttcgcacctacggaagactacctgcttttcaccatgacccaggaaggaccgaaagaacgtaaagaaatttatgaggtactggagccggatgaccgccagccgggatggcgtaaccgttcttatctggctaaatatgatttgaagaccggtttgttgcagccactgactttcggttatcacaatgtctgggctgccgatatttccaatgacggccggtatcttttgatgatgaccagtcagagccgtctgaccaagcgtcctactactttattctcactatatcggttggatatgcagactttacaggcggaattgctgatagataaagatggttttatcagtggagcccgtttttcacctgacggaacgcaggtattggtatccggctcgcctgaatcgctgggtggaatagggaaaaatgtaaaggaggggcagactccgagtatgacggacggtcagctttatttgctgaatatagctgataagagggtcactccgctgacgaaagattttaatcccagcgtacagcgtgccgtgtggaataaggtcgacgggcaaatatatttcacggccgagaaccgtgactgttacagtttgtaccggatgaatcccgctgatgggaaaattctgcaactggaggtttcagaagatttggtcaattcattctcattggcgcaaaatgctccggttatggcctattatggacaaagcgcctcaaattccgaccgtttgtacaccatgaataccaaaaagatgaaatcatctttgttggaagacttaagtaaggacatcttgaaagatgtggagctgggcgaatgcaaggcttggagttttaccaattcgcgtggtgataccatttacggccgttattacctgccgcctcattttgacgctaaccggaaatatcctatgattgtgaattattatggtgggtgcagtccggtcagccgtaattttgaaagccgttatccgcatcatgcatacgcggcattgggctatgtggtgtatgtgatagaacctagcggtgctaccggtttcggacaggaattctctgcccgccacgtcaatacagccggggaaggggtggcacaggatattatagaaggtacaaagctgttttgtaaagaacatgcttttgtcaatgacaagaaaataggctgtataggtgcgtcctatggcggctttatgacacaatacctgcaaacacagaccgatatttttgcagcggccatctctcatgccggtatcagtgaccataccagttattggggggaaggatattggggatattcgtatagtgaagtttccatggcggatagttatccgtggagcaatcctgatctttttgtaaaacaaagcccgttgttcaatgcggacaagatacatacgcctttgctgttcctgcatggtgatgcggatgtgaatgtaccggtgggagagagtattcagatgtttacagcactgaaattgctgggacgcgaaacagcttttgtggcggtaacggggcaagatcatcatattgtagactatggcaagaggatccagtggcagaatacaatctttgcctggtttgccaaatggttgcaggacgatgcgacttggtggaacgctatttataagccgaaaaacttataacttttatggtgtaagagactttggacatgtgtttttatattgttagtatgtataagcttatacgttagtatatgtaggcttatacgtactgatgtatgaccttacacgtactaacgtgggctgagtctgttttcactatccgttttccctatactgtttcggtgacattcctgtatatcttttaaaatatttcccaaagaatgagatatctgggaaattaagtgaataggctatctcctgaatagtaagatcggtggattttagtttggcttccgcatctgttatcactagtttggcgatgatatctgtaacagtttttcccgtaatcttattgacagtagtgctgaggtgctgaggggatatatgaagcagatcggcataaaaagctacactccgttctttcgtataatgtttgatgatatattggaccagacgttttacaatttcttctccacgattgaaagtacgtgtggttacattggtgttctgatgaatgctgcctacaccatgcaatatagtgagcagcatggtgctgattaagtctttattgggcttggctcccatacgtttcatttttatcagcaacataaaatagtcttgaaacaactcggttatttcgggacgcagaggaataatgggcgtgtcaatcagggctgaaagatagttcatggtggaattgaagaggtttattccattcagcaactctttgttgaaccctatcaggtacagacggcagtcgggactttgccggtggacatgtacaaaggtttctggcaaaatagtgacaatgtcgttcttttgtatcttgtgttcagacagatggatcgttatgtcacattcacctcgcaggcacagaaggaacaagcatccttccattcgttgcgggtagtggtaaatacggcctaatgatcctgtcatgtcaatttctgcaacgaaatccttatttgatttaaataggttaatgtcatctatatacttcataaaaataaagaagattttgattatgcaccacaaatataggacagttaaagcagataacaaagaaaatgcttaaaaatagactaatatatcttactgttagcacttgtacgcctttaataattatgagaactttgcagcggaaactaatagtgaagattaacagtatgaaaggtaaaaatttgtctatcatggcaatgattgcagcagtgttctgttcttgcggacagcaacctgcacaagaacgcggtccccgtcccgtgaaattggcggaagtgacctcgttaagcaggatcgaaaaatcgtattcaggtgttgtgtcgcctgatcagttcagtgacttggcctttaaaatgtccggtccgctggtagcaatgaatgtactcgaaggacagcgggtaaagaaaggacaggtagtggccgaaattgatccgacagattacaaattggattatgacgctaagagggcttcatttcaaaaggcggcatcacagatgcaacgcgcggagaaactattggctaagaacgccatttccatgcaagaatttgaaacgacccaagcttcgtataccaatgccaaatcggcatttgaagatgcgcaaaacacattgaatgacacaaagctacgcgctccatttgatggtttcatccaaaaaaaatacgttgaaaactatcagcgtgtacaaccaggacaaggagtagtgtgtttgattaatccggctaaattgcaagtggagttcactatccccgaaacgaatatttcttatgtaacttctccttctactatttacgtagaatttgatgcctataaaggaaaattatttcaagcaaaagtaaaggagtatgtagaggcttctcccgatggggcaggagttcctgtattcctttacattgatgatccggaatttgatttgaaaaaatacaaggtatcggtggggttctcatgtcgtgttattgtcaatattgagaatgatgtggtaaaagaagggattacagtacctttgtcggctgtagtgtttgacaatacattgaatagtaaaaaagtatttgtttataatccatccacacagaaagtggaacaacgcaaagtcaacgataagggtactattgttggacgtaatgacttgattgttaccggagatgtgaaagcgggtgaacaggtcgtttctgccggagcctcttatcttgtggatggccagcaagtaaaaatattaacagaataaaaaaggagaaagcatatcatgaatattccaaaatattctttggagaaccggaaggttatctatttctttttggctattttgctgataggtggagtaatctccttcttcaagctgcctaagaaagaagatgcgccttttgtgataaagactgcggtattggttacccagtatccgggagcgaacccacatgaagtggagaaactgattacggaaccgattgaacgtgaaattcagtccatgacagatgtatatcagattaaatcggaatcttatttcggactgtccaagatttctattgaacttcagcctacgattgatccggattatatgcctgtgaaatgggatgaattacgtcgtaaagtggcgaatatacaacccaaattgcccagtggggcgtctaccattacagtgaatgatgactttggtgatgtgtatggcatttattatgctttgaccgctgatgagggattctcgtatactgatttgcgtgactgggcccagcgtatccgtacccagttgactccgattgagggagtgcagaaagtgatgttgtatggggaacagacagaagtgatcaatgtcaagatatccacctccaaactttcggcactgggcattgatcccacttcaattatgggcatcttgcagaagcagaatatacaggtgaatacgggagatatagcgacagaaatttatcagttgcgcttgcgtacggaaggaacttatactagtctggaagatatagaaaatcagttgattatcagtaaggacggacgggaagtccgtttgggggatattgcaacagtggagcgtggatactatgatccgccttcaaccttgatgcgggtcaatggtaaacgtgctattggtataggtgtggccagtggagcaaaggataatgtggtagctgtgggtaaagcagtggacgaaaggttggcggaaatagagcaattgttgcctatcggtattgaacttgcctccctttatcctgaggataagattgccgatgaggcgaataatggctttatcctgaatttgatagaatcattggttattgttatcctgattatctttgtggtgatgggatcgcgtgccggtatgctgataggtagttcgttacttttctcagtaggtggtactttgcttattatgttgatgtggggagtaggattgaaccgtacttctttggcggcatttattatcgccatgggtatgctggtggataatgccattgtggtgacagataatgcgcaaataggtatcaagcgcggaaaatcacgttatcagtcattgatagagggggccatcaagccgcagtgggcattgctgggcgctacttttattgctatctgctctttcttgcctttgtatctggcaccggcatccgtggctgagattgtgaaaccgctatttgttgtattggctgtgtcactgggattgagttggattctggctttgtgccagactacgacttttggtaattttattttgaaagaagctgttcccggcggtgcaatgaaagatccgtatgatactaaactctatcataaattcgagaagtttctgaccttgctgattaaacgccgttttgtgacattgaccaccgtctttgtgactttggtgctttctttggttattatggctgttatgcctcagagtttttttccgaaaatgaataagccttattttcgtgctgatctggtattccctgagggattcagtattcatgcggtagatcaggatgtgatgaaggtggagggttatttgaagaatcatgagaaagttaaatcatattcggtgacattgggtggtactccgttgcgttactatttggcaagttcttcttttggaccgaagtctaactatgctaatgtgatggtggaaactaaagaccccgaagatgcagccgaagtagaacagcagttttatgagcacatgacccagaactttcccaatatcattacccgttcggcactttttgctttgtctccggtgcctgaagctgctattgagatcggttttatcggtgagaatcccgatacattgaccgcattggttgaaagggcgaagaaaatagcccgccagtgtgatatggtgacggatatccgttccaattggggagataaggtgcctgtgtggaaaccgatgttctctcaacagaaaggtttacgcttgggaattacccgtcagcaggttgctaattcattccgtacggctaccaatggtttgcctttgggagaatatcgtgagggggatgtttccttgcctattctgttgaaagatgaggatgtggaaaaaatgaacttgaatgatgtgaaaagtgtgcctgtattcagtacgaaaggaaattccgtgaaagtggaacaggtgatcgataattttgctttgggttatgattataatgtagtccgccgctttaaccgcgagcgttgtatgatgatgcaatgtgaacctaaacgtggagccaatacgatggctgcgtttaaacaggtgctcactgccgtacaagagcagatgcggttgcccgaagggtataaaatgaaatatttcggcgagcaggaaacacaggatgtgagtaacgctgcattggcgaagaatattccgctgaccttcctgttgatttatgtggttctgctgtttcttttccccagcaactaccgcaagccggtattgattatgcttatgttgccgctggtgtttattggtgtggtatggggattgcttttgtttggtaagtcattggacttctttgccatcctcggtctgttgggattgattggtatgaatatcaagaacgccattgtgctggtcgatgaaatcggacttcagttgaaggatggaaagggtgctgtgcctgccgtggtcgaggctactaagacacgtatcgttccggtgaccatggcttccggaactactattctgggtatgcttccattgttgggcgatgccatgtttgcaggtatggcggctaccattatgggtggtttgttcgtatcaacggtactgaccatttttgttcttccggtaacttattgtattttctttaaaatcagagcagacagataatgaaaactaagatgatctatattataagtatggcttgtatgaccggtacactttcggctcagactgtcgtggattattctacctttgaacaaaaggtactggattatagccaaaccttaaaacagagtgtggcgcaacgtacagctatgcagaaggctatgaaagcggcaaaaaccgctttctttccggctgttgatgcaacgggaagctatcagtatcgtattaacaaatacgagatggattttggcggaatggctgttcctatggagcacgattcatacagtgccgaagtaggggtatcacaacctatttatgccggtggcagtatctatcacaattataaggcttcccaaatacaaactcagatggcggataagtcggtggatttgacaacggataatattatctatgccgctgaagccagttattggggaacagccgcacaaaaagaaatgtatgaaacgatgtgccagtatgtacagattattgagcagttgaccaaagtgctgcaagataagtacgatgatggctatatcagcaagacggatctcattcagatgcagactcgtttgaaagaggctgaattgcaacgttccagcagctatcagtcttatcaggtcgccttgcagaatatgaatgtactgatgggattggaaccgctggctgaaatggatttgacggattctatttctaccatattgcctatgcctgcctttgttggagcggaaacagccttgaatgtgcgtcccgattatgctatctcccaattggatgtggattatcagaaaagacaggtaagtctggctgccgccaagtacaacccttctctttctatcggttttaaagagacatggggaacacagatgttgaacatttcgggcgaaactatgtttaatagtaatgtgtatgcctctattaaattgccgattttccattggggagcccgctttaaatcgacggctgcacagaaggctattttattgggcaagcagtatgcattgcaagataagcaagaccaaataagcaaagaagtggcgaaggcgtggactagtctgacagagaatacccgtcagataagtattgccgaggagaactgcaaactggcagaagagaatttggatttgaacacttttagttatactgaaggtaagttgactattttggatgtgctttctgcacagctgacatggatacaggcatatacaaaccttatccaatcttattatgagcagaagattgcgttggctgattacagaaaagcgaccggtataaggtatttaggacagaaataggtaaattcagaccagattcttattataaaaaaagtcacaataaagcaggtttggctatctttgtatcccaatctgctttatttgtttttatcagtttatgtttactgtaaagcttgttttaacagtggaaaaaataacaggttacaatgaagaaaatatcatttttgatcgtaatctttatatgtatggcagatgcggctttggcagtcacgcaagagggcggtctgttttatttgcctgaagatacgacaacgcaacacaaagacagcacagtacagaaaaggacttttttcaaaagatttctggactattttaatgatgctaataaagataagaatcataagaaatttgattttagtattattggcggaccacattacagtacggataccaaactggggcttggactggtggcagcggggctttatcgtgctgatagaagtgacatgcttctgcccccgtccaatgtatctttatttggagatgtttccactgttggcttctatatgttggggatacgcggaattcatatctttccgcaggacaaataccggctggattatactctttatttttattcctttccttccaagttttggggaatagggtacgatatgggtaatgtagatgccaatgaatctgatttagatcgctggcaagcacaaattaaagctagttttttgtttcggatagcggataatttatatataggtcctatggcatcttatgattatgtgcatggtaagaatatggaacgccccggattactggagggaatgaaccttactactgctaattatggagtgggcctttctttggcatatgattcgcgcgatgtgttgactaatccccataagggatattatttgaatattacccaatgtttccgtcctaagtttttaggaaacgattatgcattcagtactacggatttgcgtaccagttattatcatcctgtatgggaaggaggattgttggcaggagaattacgcggtacttttaatttcggtaatccgtcgtgggctatgatggcgctgttgggaaattcgtattccatgcgtggttattacgaagggcgctatcgtgacaagcataaaatagaggggcaggtggaattgcgtcagcatgtatggaaacgtaatggtgttgtagtttggataggggctggaactgtattcaataagttcagtgctttgcgcatggacagagtgttgcctaattatggaataggttatcgttgggagtttaaaaagaatgtaaatgttcgtctggactatggatttggaaaaaatggacagtctggttttatttttaatataaatgaagcattttaaagaatttattcagtggtgttgtgagccacaacgattgttcgttctgttcatcgttgtcttggccattcccaatgtggcattgttttttacagaacaacaaatgacacttttggcacgtatttgtaatgtcattctgccggtatcggtttattggttgattatgacattggggcgtaaacctggaaagactatttggatcttatttccgtttgttttctttgcggcattccaattggtattgctatacctgttcgggcgttctatcattgcagtagatatgttcctgaatctgacaactactaattccggggaggtgatggaactgttggataatttactgccggctgtaattggtgtttttgttgtttacattcctgctttggtcttgggaggtttctcatgggcccgaggtaatcagttggaatattcttttattcgttctcaacgtaagtatgccttggcaggcattgttgcaggagtgttattgactgttatctgctatgcgacgcaacgtgattatcaagtaaagattgaaatgtatccggctaatgtatgttataatttagtattggctgcagaacgtgcgggcgaaactgccggatatgcggaaacttcaagggattttacttttaatgccagtgccgcacatgataaagacagccgggaagtttatgtcttggtgataggggaaacggcccgtgcctgtaatttcggactttatggttatgaaaggaataccactccattacttgataaaatggaggggttggtaactttcacggatgtgcttacccagtctaatactactcataaaagtgtgcctatgttgctttcggcagcttcggctgaggattatgactgtctttatagacagaaaggaatcattaccgctttcaaggaggcaggatttcatacagcctttttttcgaaccagcttcctaaccattcttttattgattttttggggatggaggcagatgattggaagtttatcaagaaagacactccgaaaggagccaatatttcggatgacgaactattgtttctagtagaagaggagctaaaggcaggtcatcaaaaattatttatcgtgctgcatgcctatggatcacattttaattataaagaacgttatcccgaatccatgtctgtctttaaaccggataatctgacagacgccaaatatgagaataaggagtatttgatgaatgcatacgataacactatccgttatacagatggttttctggcttctttgatcactttattgcagaaaatgaactctttttcggctatgctttatacttcggatcatggagaggatatttttgatgataatcgaaaattatttttacatgcatccccggtcccgtcttattatcaactgcatgtaccatttttaatttggttgtccaaagcatatagagaagagaatgtggaagtacatgaagctatattgcagaaccgtgaaaaaccggtagcaggaaatgcttctgtgtttcataccatgctgaatttggcagggatacagacaccttatagggcagatagcctatcggtagcaaatagacaatatctcattcgtccgcgttattatcttaatgatcataatcttcctaagtcattggataagataggattaaaaaaggaagacatagaacagttcagacgaaataatcttgtttatccttgatgtgaaaaagatttaaaatggttggagaattataatagaattacgtattaatgattaatttcgcacagctttgttattgtatttattacgaaaactattataattcttttattatgaaaaacaagaaaaacaatttctatctgatgggagtggtgtttatagccattctcggcggtttacttttcggttatgatacagctgttatttcgggagcggagcaggctctgcaaaaacatttgggattagatgctttctggcatggcgtgactgcttccagtgcattgataggttgtgtcattggtagtgctttttccggttattttgcttcggggttaggacgtcgtaattcgttgcgtctggctgctttattgttctttctgtctgctttaggctcttattatcccgaatttttatttttctctaaaggagatacttcgtttgcattgatccttgcttttaacttttatcgtatcatcggggggatcggtgtaggacttgcctctgctgtttgtccgatgtacattgccgaaattgctccttccgaaattcgtggtaaattggtttcttgtaatcagtttgctattatttttggcatgttggtagtctattttgtgaattatatgattaaagatggtatgccggatgaagtgcttgtttccgatggttggagatatatgtttggttcagaagcggttccggctgcattatttggcattttattgtttttggttcctgaaactccgcgctatttggctatgacccatcaggatgataaagcgttttctgtacttgaaaaagtaaatggaacagataaggctaaaactattttgtctgaaataaaggctgtgacttccgagaaaacagagaaactgcttacatacgggttgacagttattgtagtcggtatcttgctttctgtatttcagcaagctatcggtattaatgctgtgctttattatgcaccgcgtatttttgagaaaatcggtggcggtggtgatggtatgatgcagactgtggtaatgggggtagttaatattctctttacattggttgctatctttaccgtagagaagatgggacgtaaacccttgttgattgttggttctattggtatggctgtaggtgcattctgtgttgcattttgtgatgagtttcaggtgggaggtattcttcctgttctttccatcattgtttatgctgcattttttatgatgtcatggggacctatctgctgggtgttgattgcagagatatttccgaatactatccgcggcaaggcagtggctatcgctgtagctttccagtggatattcaattatctggtctcttccacttttcctgccatgtatgaattcagtccggtgtttgcctatgggctttatggcgtgatttgtgtgcttgcagctctgtttgtatggaagatggttcctgaaacaaaaggaaagactttggaagatatgactcgtctttggaaaaaaagagcgaaggaggcttgagaatctttcttctgatcaagaactatttcatattgtttccttttgataatatcgtccgacggatataaagcgtatgtcttatattcatcggatgatcgctttataaaggttggatgagccatctttgtcttggacggatgtgaatagagcaagaaaaaagacaggcatgcgaaaatattttcgcatctgtcttttttcttttttatcaggatgggattgttttatttcttttcccctattgttttcagcatttcttgtacggctgcttccaactgctggtcttcacctgccaatgccttttctggagtattataaacttcaatgtctggagaaagttggtgattttctgcatattgtccacgcatatccatgcaacccacctgaggaataccgaacacaatgctcggatcgatttggttttcccaccatacggcagtcattgtgcccggaaccggtgcgccaatcagtttgcctatctttaattccttgtaaacccatgggaagccatgtgcgttactgtaattgtcctcgcataccaatacgcaggatggcttgagccatttattgaatgggtcgctgcctatgtattgtccgcgtggaacgaaacgctgatattccttgccgcttaataaagtggccaagtcatcatgtagccagccgcctccattgtggcgtgtgtctacaataatagcttctttgttgcggcagcgtcccaatacttcactatatacttcgcggaaactttgactgtccataccttttacgtgtacatagcctatgcggccttcggataatttatcgactatattgcggcaacgttctacccaacgtttatacagcaagttactttgttcgcccgtgctgatagctttgatggtgatatcaaaacgtttgccggtagccggattatatatggccagtaacacttttcttccggctttgccttccagtagcgggaagtagtcttgtccttttacgataggtttgccgtcaattttctcgatgatgcaaccaggagtaacatccgtttttttcacggcaaatggaccttttgctaatatttctttaatttttagcccgtcaccatcataagtttcgtcatagaatgctcctagggtcgctgtggatagtgtaggaccgtttgagtagtaacgtgctccggtgtgtgaaccgtttaactcacccagcatttcactcagcatttcctgaaaatcataattgttattgatgtatggaagaaagcgtgcgtatgctttgtgatagcctttccaatctactccgtgcagatcttttacgtagaatttatcttctacttgttgccatacatgatcgaaaatatattcgcgttcaccatagggttggtagtcgaagaaagcttcgaattctacaggtttggtttcaccactgctgacagtaactttcttgataccaccttggctgcaaaggaacagattctcgcctttcttatcaggaagcagggctccgccaccgacttttttcatgacgattttagtcttgttttctttaagatcgtgttcccataaatcatatccgctttcgaaggctgcttgataatatagtttgtcacccttcggagttaatacagcatctcccaatcgtgaagaatttacagttagacgaatcacacggtcacggctgttttcaaggtcgaaaaccagtggttttacttccttcttgtcatcttctttcttggagtctttctttttatcttttttattatcagccttctttttctcttcactcttctctttgtctttcttttctgattcctccagcaaagcaagttcttccttgctcattctgaaacggtcgtatgcgtccaagtcgaagaacatgatgtagatatccgcttcagcgccccagcttccgtggctgcggaatcctgcgcggtcactttcccaaatcatggcttttccatccaatacccatttggcattgccgtcactgtatccactttcggtcagattatgaatttctccgttgccagatgcgttgaccagtgcaacatccttgttattccatccgccaatacctatgtagttggtaagaatccatttgctgtccggactccattgataccattggtcaccgtcgctgtatgaatattcatagttgccatccatgacggttcgtacagcttttgatttcagattcagaacacggatggtagtacggttttcaagaaaggctacttctttgccgtcaggactgtattgaggttggaatgaagtgatatccgaattggtcagtctttcctctttgatatcggttgcgtaagcgaactgtttttcttcctttttagctagactggtttgataaatctgccataatccgtttctttcggaagcgtaaacaatacttcttccgtccggagaaaagtgaatatcgcgttcctgttgcggagtattggtgatttgtttggtggtgctgtattctgttgatgtgacatatacatctccgcgtagtacaaaagcaatttcttttgcatcgggtgaaagggatatttctgttgctccgctacgcttaatctggcggatgagatctttgtcgttcttgtcggtgacaatggaaatctgaactttttgcggaatggcaccttcttttaccgtgtagatttcgccatcatatccatagcataatgttccattggaggcggcactcaggaagcgtaccggatgtttggtatggttggtgatttgtttggatgtattaccgtcaatatcacgtttgaaaatattaaatgagcctttttcctcacttaaataatagaatgatttatcatctgaagcccaaacgggagtgcggtcctcaccattgaaagtagtttgtttgcgaaaggtacggtttccattcagagaacacagccaaatatcgcgggtaatggatgaagtgtgatgtttacgccaaggatcttcatatccttttttgtcatggtagagcaaagtattacctgtgtgattgatactgatatcttccatcggcatggaagagaagagggcagggcgtcctccttcggtattaacttcatatacttgttggaattgtccggaggggaattgtgcgtcttctacagttggcattatattggctagaaacagaatgtgtccggcgtctttataagccaccggtgtttcattacccgaatgggtggttaatcttttggggatacccccttccttgtttacctcaaaaatatccatacttcccatgcggtctgatgcgaaagcaattttttttccgtcaggactccagataggtttggtgtcgtgggcagggttggttgtaatctgactggccctgccgcctgtagagggtactgtgtagatgtcacctttataggtgaatgcgatggtggttccatccggagaaatggcacaataacgcatccataatggattgtcctgtgcatacgtggaaattgacaacaaaattgctgccacacctagtagctgtcttttcatgtggataaaatgttgtggttaatactaagttatttcttctttttcaggaaatatcctctgattctttgcatgatcttgataccggtccgtactccgtcataaacggcgattcctgtattgatatgttgcataatgccttctacgcctcctttttgttctacaggcgcaaaaagttcatgtatggtttgtaccatttcttttttagcttgctgtacttcttccaacttctcagcttttcgttgtgctatcacttccaaagtgatgatgggcgttttattaggagtattctctttcataatcagttgtcatttaaaagcaggttggcaaggaaatttaccataggctggacaatcagccgtttgcggaataaaacgattaacagaatcagcagaataatgcatccggtaatgattccatagctagccataagcccgcctacatgaggttcgagtacataggccaatgtaaatgacaagtagaaaagtgcgataatacctaatatcaataatataaagacaaggatgagggttgatatcagtatagtaagtttttctactaaatgtaattttacataatccttttgtaactctgcgtactttttaagctctgccagaagttgttgcagattatctatatttttatcgtttgcaaacatgcgtggagttttgatttaaaaattattgtcattccggatccaagtccggaatgacaatacacttttgtgggcgttgcttattcttttacctcggctgcaatttcatcgaccagattttccatatctgtgcgacttaatttgatacctcttttacgtaaagcatcagcaattttgctacgagtgtcttctccgctttcaggagcaaataaaatacctgctgctgcaccaactacggctccgcctaggaatgcagctaaaatacttaatcctttcatagtttttttgttttttgtaccttacaaatctaacaaataaaactgaatgttgttgtttattttgtctatttttgaatagaaattggagattcttctctgattaactaaatttaactccattcttgatgtgaaagctgttgatatattgctacttttgcaccaatataatggaattaaactagagtattaatttataaaagattgagtaatcatgaaaaaattagttgtgttgggtatgggattgtgcgtagccttggcattttcctcatgtaaatctagcgaaagtgcttacaagaaggcttatgaaaaagcaaaacaacaggaattggctgaagctcctgctgatcaggtagaagcaactccggttgaagcaactccggttgaagctgctccggtagtatctgcccctgtgacaactgctcctgttgccggtccggttcgcgaagagaaagtagaattggtttcaggtgacggcttaaaagcatatagcgtagtatgtggtagctttggtgtgaaagcgaatgcagaaggtttgaaacaatatttggatggtcaaggttataatgccaaagtggtttataatgctgaaagaaatatgtatcgcgttatagcatcttcatatgatgaccgtgcgcaggctactcaggcaaaggaggagtttaaggcaaaatatcctaaccgtgacgatttccagaaggcatggttactatatagagtatattaatgacttctttttggtaaattaagaagaaaatatagtctatttttctttattaaaagtggcaactgtgaagttgccgcttttttttatagctttgtcggttctaaacaacaataaaaactaagggtatgaaatattatggcagattatcggtcattgctcttttggctatagcaccgctgtatggctttgcccaggaaaaggtggtgcctataaaatacggagatatggatcagtggataatccgtaaggttcatgagtccggtgttataggcggcaataccaaacttctttatgagataggtcctacaaaggaaatagatggtaacaaaccttataaaaatatgggagggtctccttggggaacctctaatgtgatggctaaggtagtgggcattgttaaaacaaataattctgtttatagagacaaacgggacaatggatattgtgctcgcctggaaacgcatatagagagcgtcaaagtattggggatggtgaatattactgtattggcagccggatccatttatttaggtgatatgctggagcctataacaggaactaagaatgctgagaagaacatgaactggggagttccttttactcaacgtcccaaagctgtccgttatgattataaggtaaagatgtctggtgagaaagatcgtatccggttgacaggtttcagcaagaaaggtcaggtggcagggcaggattgtgcgataactgttttctttttgcaaaaacgtatggaggacgctgaaggaaatattacggcgaagagggtaggaactatggtgatgaaatatgataaggattcggatggttgggtaaatggtgctacttatgaagtgctgtatggtgatataaccaagcatccgtcttataatcatgaaacaatggggttgagagagagggattatactagaaatagtaagggagaaagtgtcttgattaaagaaataggatgggcggaggccaatgaaaatcctacgcacatgatactgcaattttcgtccagtcatgggggggcttttatcggttctcctggaaatacactttgggttgacaatgtgaagctggtctattgaggatagtaaatgcttttgtttgtataatgttgcttatatattagtctgtgtcactatacgatagaatgttttaaaatcgtcttgagcttttttaaaaacaacaggatgtatttaaaaaagctcttgttcttttctaaatacgtcctgttgtttttatgtatcagttttttgcttgtatagcccgatatcttgttacaagattcggtaaatactacctcaagtttccagaattgtatagccaagatctgtagattcttgttatatgatttatttgctgttgctgcttatgtgatcaaaaaagcagttgaagaaaaagagggagcatcgtttgttacgatacccccttctttaatctatcagagttttatcaggtatatcaatgattattttacttccaagataactacgcggttcaaatagttcttaccaaacatgttatctgttccacccatagcaactttttcaagctggctttcttttacgccttctgcaaccaatgcatcgtaaacagcctgagcacgtttttcagacaaagtctggttgaatgaagcagatcctgtagctttatcagcgaaacctgcaattttgtacttagcgttaggattagctttgattgctttagccattaactgtacattaaccataccttccggactgatctttgctttaccgatcttgaagaagatagcaacttctgcagcgctaggaacttctttaatcacttccttaactacttctttcggaacttcgcggatcacttccttgatcacttctttttctactacacggtcttcaactttagcaaacttcttgccaccaaagatgtagctgacaccagctgtcaacatacctgttccttcagctttacggtggctactgatattaccaaagatagaaggagcgatggcgccgcgagcttcaacatcgatagcccaatatttgttaatgttgaacttcaagcctacaccggcggatgcaccaatacgtgctcttgctttgctttcaccttcgggaaccattgttccatcattcttgattgttacgttctgtgacttagctacggaaagcataggaccagcaaaaccatatacttcaaaaaaacggctaggattagcacctgcaaacagagttgacaagtttaccatagcgtcaatgttagctcctacgtagttcttgttgtgttcgtagtaactgttatccaaacacaagtgttgtgtgataccatttacctgaccacgtatcccccatgtgggagtaattaacttacccaaagagatgctgaagtgaggagccagcttattgaaaccatcgttttcaatagcgtggatacctccacctacactgacgaagatgttatcgctccatttcggagtataatagttggtgtcttgtgctttaagagtagtagcacaagcacctgccatcagaagcgacagagttaatactttatatttcattttactataattttttggtgaattattattctacgtgttggtttaaactgattgattatttaccagctgcaccaccacctgcattgccattgtctccgtgaccgtgaccgtgtgataatacttccaaacctgcatcagtagtacctgcttcttttacttttacattaggaatagtatagattacattgtcaacagtagcgctgatagacataacgtattcagtcataggtgttacaggtttgaatacaaatgttactccttctgtcattgttacttctgtcttgattgtcttagttgccatgttatcataagtatctactaatgctttcaatacagcaataacattgtcgttgctcatagctcttgagtttacaagagtttcaatgtatgaatagagttctgttttgttaagaattttagtacctaccaatgcatcgtattcaacttcttgcggcttgcctgtacctgtatattcttttgaagtcttgttggattcagatttaacttgttcaattgaatcttcatctttagaagtacttacattctgtgctgcagatgctattttctgtgcgtagaaagttacaggaataagaatcatctgaccttttgctacttctggaacttcaacatcgatagaagctacgggcaaatactcggcacttgagaaaggacaagtaacagtaactttttgtttagcgatagctccattttcgccagctgcaatagttgttgttgctgtacctagattttcgcctgttgtctgatcatacacagtagcaaagattgtggcactagcgggtgcttgttcgattggttctacattaaattcttccttttcgcagcttgtgaacactacagttgttaaagctactgcggccaatgccaatttagcaccaataccgctcaaaaaacttttctttttcatctcaataaaattaaaaatttaataattctgatttaataaaatatggattaaaactattttgttgcattatattttcacttgcattactatatggcattttataataatatttttcatttcctgcattatatgttatacccgtacccaatgaagtagaaacccttggtatatatttatgtcttttatatttataaggtggtaatgcaacgatgaatttaaaccctccattactattggcatgttcagcttttacagcgtaaaaacctatactggcatagcggaagtgtctgatcatttcaaatcttacccctttttcttttaataaatattgttcagctctcaatttaaactgtgtattaaaccttggccagtaaaagtttccccctacagaccaataagtagtgtacttatcattatagcgaaatttaaaacctctccaatatccaaatccgacataaccgaatcttccttctatagaaaatcgctcatccttgaatggataaaacagatttaaatctgcaccatatgtatcataatcaaagaaacctattgttgctgttcccagtatattataaggcagacgaaattgttgtgccaaggttagatatccaggacgaacttttcctgcaagttctccatatccgtcattatacacaggcagaataatctgtccagtaaatttcattcctggccaaagcgacacctctaccgccgggctaaactctaataaagcctgatatatctgtgtaatgatatagttcttaaagtatagctgcggatataccaatatatctactttaaacagcgaactgttctttttcttttctttcttcaccttgtcccaactgtcacctatatcataactgactttccaatcttcaccacttaccactgttgtgtcaccggcaagaggctgataggtcagtgagacctgaggtatattatagttggtaacaatcaacttacaagatttatccttgggtaatcccattgactgtatgatatctacagcctttctaatacccaacgcttgaattttgtaagcactgttttcaaccacataaactctttcttcaggagtatctgtccatcttacattttcaaatcccatttttacaagactatctgttgttaattctcctgttgattgactgaaactttttaatggaatcataacaagcaacaatatagctatacaatacaacaaacatctatataaaactccttttgaagagctcttatttttcattttataacaaatacttgtttcaatttaacattatgcgacccttacgttaagccacatattcggtgcaaaaataagtactattttttaaatagcaaataaaattaaacgaaatgaatcgtttcttttgaaaaaacagttgaaaaagcatattttaatctttatatataaaataggtatggaataaatttgtatttttgcaaactatatgagtagaatattagcgatagattacggtaaaaagcgcacaggtgtggctgtgacggatgttttgcaaattattgcaaacgggttaacgactgtccctacacaccaactactggactttattctgaaatatgtggaaaaagagcctgtggaacgcatcattgtagggcatcccaagcaaatgaataatcaagagtcggaaaatatgcgtaatattgtcccttttgtcaatcaactaaggaaaaaattaccggatataccgatagagtttgttgacgagcgatttacgtccgtattggcccaccaagccatgttggatggaggtttgaagaaaaaagataggcagaataaagctttagttgatgaaatcagtgctacgataatcttacagtcctatttggagtcgaagagatatatttaataaataaaaacagattaagaaaaatgatattacctatttatgtgtatggacaaccggtgttgcgtaaagaagcagaggatattaccccggattaccctaatttgaaagagttgatagcaaatatgtttgaaaccatgaatcgtgcagatggtgtgggtctggctgctccgcaaattggtttgcctattcgtgtcgtaactattgatctggatgtgatgtctgatgaattgcccgaatttaaggatttccgtcgggcttatataaatcctcatattttagaagtgggtggagaagaagtcagcatggaagaaggttgtttgagtttgccaggtatccatgaaacggtgaaacgtccggaccgtattcatgtgacttatttggatgaggagctgaaagaacatgacgagtgggtggaaggctatttggcaagggtcatgcagcatgaatttgatcatttggacggaaaaatgttcattgatcatttgtctgcattacgcaaacagatgattaaaggaaagctgggggccatgttgaagggcaaggcgcgttgttcctataaggtcaagactataaaatgataactccgcgattttgatttatgcgccacaggtggcgcatttgtggggaaaaccgtatttttataaatacaaaatgataaaacggatactctatacattattaataatgttccctgtactagcttcggcacagataaatacggacagggtgatggcgatagggcgtaatgcgctttattttgaggattatgtcctttcgattcaatattttaatcaggtgattaatgcaaagccttatttgtctgatccttatttctatagaggtctggcgaagataaatttggatgattttcagggggcggagagtgactgttcagaagctattgagcggaatccgtttgtggtaagtgcttatcaggtacgtggattggcacggatccagcagaataattttgcgggagctatagaagattataccaaggcattggagtttgatcctgagaatataggggtatggcataatatggccctttgccgtatcaggcaggaagattataagggggcgaagaatgatctggataagctgatcgctatttccccccgatatacaaaggcctatttgatgcgtggtgaggtggatttgaagcagaaggatactttggctgccgaaaaagactttggtaaggcgattgaaatagaccgttatgatgcagatacatgggccagccgtgctatccttcgtctgcagcaacagagatataaagatgcggaagctgattttgatcatgccatccgtctgtccacccgaaattcaggtgtctatatcaatcgtgctttggcccgttaccatcagaataacctgagaggagcgatgagtgactatgatattgcattggatattgatcccaataatttcatcggccattataaccggggcttattacgtgcacaagtaggcgatgacaaccgggctattcaagactttaattttgttatcgaaatggagcccgacaatatgatggctattttcaaccgtggtctgttattggatcagacaggagattataaaggggcaattaaagattattctacggtgataaatgaatatcccaattttttgctgggctatcagtacagagcgcaggcacgtaggaaaataggggatgtaaaaggtgctgatgcagatgaattcaaagtgttgaaagcacaactggataaacagaacggagtagatcctaataagcagactgccgataatacagagaataataaaacccgtaagaagtccgacaaaaacatgaacaactatcgtaagattgtggttgccgacaacgaagagggagaagaaaaatataagagtgactatcgtggacgcgtgcaggataagaatgtgaatattgttccccagcctatgttcgtgcttacctattatgaaaagcacgatgatgtgaaacgacaggtcaactattataagttcattgaaacattgaataatcagaaagtacttcccggtcgtctgattataactaatgaggaagctcctctgacggaagaacaagctacaaaacattttgcatccattgacgaacagactgctgctattgtggctgatccgaatgatgtgaacaaacgttttgcacgttcattggacttttatctggtgcaggattttgcaagtgccattgaagatttgaatcaggctattattattgagggtaatttctttccggtttatttcaatcgtgctttaatccgttataagcagctggaataccagaagatggaaaaagagtatgatttgaaagtcaatccgggagagaagagtgctgtgaaagctgcggactatgaaatggtaaagcgcgatttggacaaggtgattgagctggctccggattttgtctatgcttattataatagaggtaatgtgctttctatcttgaaagactatcgtgcggcaattgttgattatgacagagccatccagttggatcctaaatttgcggatgcttatttcaatcgtggcttgacacatattttcttgggtaacaacaggcaaggtatacaggacctgagtaaagcaggtgagttgggacttttctctgcttacaatataatcaaacgctttacggaacgaaaagaataacatttttttgctaaaaagaggataagtcaaaaagatttcgttatttttgcatcctcaagaaagaaaataaatagaagattatgataaagataacattccccgacggctctgttcgcgaatataacgaaggagttactggtctgcagattgcagaaagtatcagttcacggctggcgcaagatgttttagcttgtggtgtgaacggtgaaacgattgatttatctcgccctatcaatgaagatgcaaacttcgttctttataaatgggaagacgaacagggcaaacatgctttctggcacactagtgcccacttgctggccgaagcattgcaagaactttatccaggcattcagtttggtatcggtccggccattgaaaacggtttttactatgatgtagacccgggtgaagcaatcattaaggaggcagatttgccagctattgaggccaagatggccgagttggctgcaaagaaagaaatattggtgcgtcagagcattgctaaagaggatgcgttaaagaaattcggtgaaagaggtgagacttataaatgtgaattgatctccgaactggaggatggacacatcaccacttatacacaaggtgcgtttaccgacctttgccgtggtccccacttgacctctactgctcctatcaaagctatcaagctgctttctgtggccggtgcttattggagagggcaggaagaccgtaagcagatgacacgtatttatggtataactttcccgaagaagaaaatgctggacgaatatctggtaatgctggaagaagccaagaaacgcgaccatcgtaagataggtaaggaaatggatttgttcatgtttaccgatatggtgggcaagggacttcccatgtggttaccgaaaggtactgccttgcgtatccgtttgcaagatttcttgcgccgtatccaggcccgttatgattatcaggaagtaatgtgtccgcctattggcaacaagaacctgtatatcacttccggacactacgccaagtatggtaaggactcgttccagcctattcatacacccgaagaaggggaagaatatttcctgaaaccgatgaactgtcctcatcactgtatgatttataagaattctccacgttcttataaagacctgccgttgcgtatcgcggaattcggaaccgtatgccgctacgaacagagtggtgaattgcacggactgacccgtgtgcgcagttttacgcaagatgatgctcacttgttctgtcgtcccgaccaagtgaaggaagaattccttcgcgtgatggatatcattaacattgtgttcaagtctatgaattttgagaatgtggaagctcagatttctcttcgtgacaaggtgaaccgtgaaaagtacattggtagtgatgagaattgggaaaaagccgaacaagccattattgaagcttgcgaagaaaaaggcctgactgcgaaagtggaatatggtgaagctgcattctatggacctaaattggactttatggtgaaagacgctatcggccgtcgctggcaattgggaacaattcaggtagactacaacttgcccgaacgattccagttggaatatatgggttcagataaccaaaagcatcgtccggtaatgattcaccgtgcacctttcggatcaatggaacgttttgttgccgtattgattgagcacactgccggtaaattcccgctgtggctgactcctgatcaggtagctattctgcctatttctgagaaattcaatgagtatgcggaaaaagtgaaagcagaactgagaaaattcgatgttcgtgctattgtggatgaccgtaatgaaaaaatcggtcgtaagattcgtgacaacgaaatgaagcgtattccttatatgttgattgtaggtgagaaagaagctgaaaacggtgaagttgcagtccgcaagcagggcgaaggcgacaaaggaactatgaaaatagaagaattcggaaaaaatattgccgaagaagtttctaatatgataaataaatggtaactttgcagccgtttgcaaaagagcacattgttaaacctttatgtattcttttgcgttaagataaagaaatactaattaaaataagaagaaacaaacaggaactaaaagttttttaatgaagaatgacagtttaaaagggcaacacagaatcaatgaacagattcgtgccaaagaagtccgcatagtgggcgacgatgtagaaccggcagtttatccgatagctcaagctttaaaaatggctgaggatcatgaggctgacctagttgaaatttcacccaatgctgttcctccagtttgtagaattattgattattctaaatttctttatcaattaaagaaacgtcaaaaggaacaaaaggctaaacaggtaaaagtaaacgtaaaagaaatccgtttcggacctcaaacagatgatcatgactacaacttcaagttgaaacatgccatcggattcttgcaggacggagacaaggtgaaagcatatgtgttctttaaaggtcgttccattcttttcaaagaacaaggcgaagtattattgcttcgttttgcgaatgacttggaagaatatgcaaaagtagagcagatgcccttgttggaaggtaagagaatgactatttctttggctccgaagaaagcgggctctccgaagaaggcagaaatggatactgctaaaaaggaaaatccgaaaaaggcagtagaagcaaaagaataaaaaaagagtgcgtaacgcgccggtatagtgcgttaccaccatttgaataataatttaaaattaaaaacaagatgccaaagatcaagactaactccggttctaaaaaaagattcgttcttaccggaacaggtaaaatcaaaagaaagcacgcttttcacagtcatattttgactaagaagactaaaaagcagaaaagaaaccttgtacactcaggtctagtagctaatgctaacttggatcaagttaaggaattgctttgcatgaagtaatctaaaaacaacgaaagcgtaaacgtattatttaaagtattaaccgaatgtctttagcttgaagttcaccgtgtgaaacagtggcgctaacattcaaaaagaattaaaactatgccaagatcagtaaatcatgttgcttctagagcaagaagaaagaaaattttaggtcttaccaaaggttattttggtgcaagaaagaatgtatggacagtagcaaaaaacacttgggaaaaaggtttgacctacgcataccgtgaccgtaagaacaagaaacgtaacttccgcgctttgtggattcagcgtatcaacgctgcggctcgtctggaaggaatgtcttattctaaattgatgggtgcattacacaaagctggtatcgaaatcaaccgtaaggtgttagctgatttagctatgaaccatccggaagcattcaaagcaattgttgctaaagcaaaagtagcttaattcttctgtaaacggtgatataaagatttattaaaagagcaatctctatgaggttgctcttttttattgcggatgctttgtgatgtttcattaagaatttgaaataacaataagcagaattacagagagttattttcttgcttattatttttaacaaacaaatcctgctatactcttgtttatatcataaaaaggacgtatatttgtcatacggaaagagatgaaaagcgagccgcattagttggattgggaaactcatcaaactaatctgaaaaccgagacatagcttcatcttccaatggcgggccacgccttcgggtagcatttatgccggtggattacaaaggaggagagcactcaaaacctgtcattcggagtttcatcgcatcactggtgcggcttcattataaggcgatgttaattcaagagattagcatcgcttcttttttataaaaataatacggatatgatattttatttttcaggtacaggtaattcagcttgggtggcaaggcagctggcggaaggacagaatgaggaattgttctccatcgctgtggaaatagataagaataaggagtataaactaagagaaggagaaaaagtaggttttgtcttccctgtgtatgcatggggacctccggagattgtacttcgttttatccgtcggttgaagatgactaagccggaatatcttttctttgtctgtacttgtggagatgatacgggtcggactgcacaactcttttcttctgctgttgcccggaagggatggcggtgtgctgcaggttactcggtcaccatgccgaatacttatgtttctttgccaggttttgatgtagacgatgaagatgtggaaacccggaaagtgcataatgctgttgcccgtgtacgctttattaacgaggagatagcatcaagggttcaaacgaaacattataattgccatgaaggtgcgcttccatttaccaaatcctattttttgcgtccgtttttcaatactttcctgatgtctcctaaaccttttcatgctacagaggcttgtattgcttgtaaaaaatgtgagaaagcttgtcctgtgaataatataaaagtgacggatcgtcctgtttggggagataactgtacccaatgccttgcttgttatcatatttgtccggttcatgctgtggaatatggaaaagttactgcgaagaaaggacaatacaaaggacggctgctgaaagacttataagtgcgagaaatggtctgtattggttttatattccaaagaagaagattctatacatagacattaagttatctatccatttggaaggtgtgtcgaaaccctcatgaactaaaaatcaccctcgttacagaagttgaactgcactcctaaagttttgtgtccaacttttagggtgcagttcaacttctgtaacgagggtgatttcaataaaagggaagtattcccttttattttatcttccgccggtttaacgcttgttgataacgtcttgcattcgcttgatgctgggctgctgtgacagcgaaattatgagtgcctgagaaatcttctttggcacacatataaatataattatgctgtgtatagttcagtacgctttccaatccttggatggatgggattcggataggtcccggaggcaaacctgcatacttgtaggtattataaggagagtccacttccagatgtttgaaaagaatgcgtttcagtccgaattcctgtaaaccaaattttaccgtcgggtctgcttgcaacaacatccctttattcaatctgttaatataaagtcctgcgaccatgggcttttcgggaccattggccgtttcttcttccacgatagaggccagggtggacacttcttcaggagtaagtccgatatgttcagcctttttcagcctgtcattattccaaaaggcagcatgttctttttgcatccgtttcataaaagcgtcagcactcatattccaatacacctcgtaagtgttaggaataaaaagggaggggagtgtctcttgggcatatcccatttgtgcacaataagcactgtcggaaattaatttggcaatatccagagaatcaatcatgagctggcgtgaaacggcccgcactaatctgtccacggtgcgtacactgggtacagtcagattaatgggagtctgatatcccatagaaagacgccggaagaggtagcgcatattgtccgatggattgagagcgtaacgccctgtccgtatattgtcgccatacttctctttttctgccagatattgaaaaccgaacatacttttaggatgtccgttccggattattttatggtacacagaatccaggttatcatctctgtctatataaatataggtagtctttgtaagctggagctgcttggcaaagaaatagtaatatatacttcctgcgccacctgctcccgctaggataattataagaataactatccatacaatagtacgtttctttttattcattttagtctatcgggcttttttgtatgcaaatataggcaaatatccctttcttttctacttttgacgattttgtacccctaaaaatacaattttgtccactatccggttgatgtaaaatgtgtaaatttgaccaaacaaaaaacgagaacgcaaaatagtatattaattattttatttttaatcatgaaaaatgcacttatgggcttggcattgttcgctgcaatgccggtatttgctcaacaaaaagcgactatcaatgtacatcccgagcaagggaaagaaatcatcagtaaacatatttatggacaatttgcagagcatctgggaacttgtatttatggaggtttgtgggtaggtgaagattctaaaattcccaatacccaaggctatcgtaatgatgtgcttcaggctttgaaggacttgaaagtgccggtgcttcgttggccgggggggtgttttgccgatgaatatcattggatggatggtatcggcccgaaagagaatcgtccccggatggtcaataataactggggaggtacagtagaagataatagtttcggaacacatgaatttctgaacttgtgtgagctgataggttgtgagccttatatcagtggtaatgtaggaagcggaagtgtggaagaaatggcgaaatgggtggaatacatgacttctgaacaaggtagcccgatggcgaaactgcgtaaggagaacggtcgtgaaaaaccatggaaagtgaaattctttggggtaggtaatgaaagctggggatgcggaggcagtatgcgtcctgaatattatgcagacttgtatcgccgttattctacctattgtcgtaattatgatggcaaccatttattcaaaatagccagtggtgccagtgattatgactataactggaccgaagtgctgatgaaaaatgtgggtcatcgcatggcaggtctttctcttcattattatacagtgaccggatggagtggaagcaaaggttcggctaccgagttcactaatgatgattattattggactatgggcaaatgcctggaaatagaaccagtattgaagaagcatatcgctattatggataaatacgatccgaaaaaacaaatcggcctgatggtggacgagtggggaacctggtgggatgaagaaccgggaacggtccgcggacatttgtatcagcaaaatacgctgcgtgatgctttcgtggcttctttaactttggatgttttccataaatatacggatcgtatcaagatgacgaacattgcccagattgccaatgtgcttcaatctatgattctgaccaaggaagacaagatggttttgacaccgacctatcatgtctttgaaatgtataaagtgcatcaagatgctacttatcttcctttggaactgaactgtgaacgcaaggtggtacgtgacgaccgcattgttccgatggtaagtgctaccgcttcacgggatgcaaacggttttattcatatttccttgtctaatgtggatttgcaggaatcgcaggaaatagagttgaatctgggtgaggtgaaagctaagagtgttaccggccgtattttgaccgctaataatataggtgattacaatagtttcgagaaaccgagtgtggttgccccgaaagaatttaccggagccaaggttaataagggaagcttgaaagtgactcttcctgccaagtctatcgtggtgttggaagtgaaataaatcacgtacgtacgtgtagcccttcacatacgtcagtgtagggctatgcatacgtatatattgcgccacacgtacgtatgtgatgggttacggtaactcttgtaccctctctgcttcaattctgttttctacctcatccggcagggcagggaagaaatctatattcgttcttttctctacgctgtccactgttactatatatttcttcagcggcttatgtccggcgctgttggggaagataaatcctatggcttgcggatttttcttatcatttatcaatatgactttatagaaagcatgggggactgccactttgttgttgccgattcttttcgggcgtttagtatcatatatggggccgcaggcaatgtatacagctccatatttttttgcccattggcgtgacttttcctccaggtcattccagtcaccgcggttcagattagggttttgcggacaaatgttgctcatataaaaagattctttcatggcttgtttgctccatttcatatcggcggcaggggccatgtgtccccggtcgtatcctgattttgtataatctcccgtatatgctttggctccacgtacgtccgggtcgggcaagaatttgtctgttcgcccttcttttccttttgtttcttttttagtaagctcccatgctacccattgtggagttttgtaatcggcattataagatagggtatatcctttacgtttcaatatctgtccgcctgtgcccgattgcatcgtcgggatttccaatgcaccgccatgttggggcgaggtcagtatttctggcttttcttcattgctttcgatagtggggatattttcaagcagtttcccgtcaaacaattgatgtttatatgccaaaagtcccagtaatactaaaataatgatgactctcagggaactattggattgtttctttttctttgcgctcatatttgttctgttttaggggtgtaaagatagaataaaatataaaaatacattatctttgtccattatatagctgtaaattttaataatactgacatgctatcctaactaatcaaacctattatatatgaaaaagaaccgattatcgttagcgttcctgggtttgctgattgcagcttcccctttacgggcacaggatacgccgcagactgaaacagccgagcaaaaggacaaaagaatggaatggttttcacaagccaagttgggtatttttatccattgggggatttattctgttagaggagtgtccgaaagctggtccttctttaacaactacctgccctacgatgaatacatggagcaggaaaaaggtttcacagcctccaagtatgatccgaaaaactgggtggatctgatcaaagagagtggggccaaatacacagtgataaccaccaagcaccatgacggagttgcgttatgggataccaaagtaggagatatcagcgtcgtgaaaagcactccggcaaaacgtgaccttatcgctccctttgtaaaggaagtgagaaaacaaggattgaagcttggtttctattattctttattggactggtcgcatcctgattatcctaacaaaacccgtacggaagtacgttataaaaatgatcctgaacgttgggcccgattcaacaagttcaatttcggacaattggcggagctgaacaagacctggaaaccggatctgtattggtttgacggagattgggagcaaagttcggaagcatggaattccaaaggaattgtagatttgcttcgttcggataataaaaatgtgattatcaactcgcgtatacaggggtatggtgactatgccactcccgaacaaggagtgccggtggtgcgtcccgaagataaatattgggaactttgtatgaccatgaatgattcatggggatatcagcatacagacagcaactataaatcaccctatatcctgcttcgtacatttgtagactgcctgagcatgggtggtaatcttttattggatatcggtcccaaagaggacggttccattcctgaagaacagatcgctgtgttgaaggagttcggccgatggaccaagaagcataaagaagctatttatgaaactcgcgcaggtattcctaccgagcatttccagggatataccacactgaataaggcgggggatattctgtatttataccttccttacaaacctaacggtccggtggaagtaaaagggctgatgaacaaagtgaaccgtatatgggtggttggtaacggagctatgttgaattacaaggtctacaataaaaattattggaattcagtgccgggtaatctctacattgatgtaccccaacaggtgcaggatgagcagattaccgtgctggccgtgttgctggatggaccgatcaaactatatcgcggagtgggacaagtgcaagataataactaacttgaatctgaaaaatacatgaagaaacttatttataccctgttacttctgctggttacttttccggcaatggcacaaagcctttttgaacaatatgagcgttttctgaccgaaccgcgtacttatgtatgttatcgtccggatggaaagttgaaaatagatggtaaactgaatgaaagttcctggaacaaggcggcgtctactgccccgtttgtagatataagcggagaaggattcccgactcccaaatatgaaactaccgccaagatgctgtgggatgatgaatatttatatgtaggagctgttcttcaagaagaggatatcaaggcgcgtcttacccagcgtgataccatcatctattatgacaatgactttgaagtgtttattgatccggatagcgacggacacaattattttgaaatagaaaccaatgcgcgtggcgtgattttcgatctgatgctggacaaaccttatcgttcgggtggaaatttcatggtgcaatgggactgccccggattgaagactgccatccattgcgaaggtacactgaataaattaaaagataaagataagtattggagtgtggaaatggccattcctcatcaggcgctgaccatgaactttaacaatccgttgaaggctggcaatacctggcgcatcaacttttcgcgtgtacagtggctgaaggagaaaggacccgaggaaaattgggtatggactcctaccggaagaatcgatatgcacatgcccgaccgttggggatatctttatttcgtagacaagaaagtgggaacctcgcaagatgagttggtttacccgtacaatcaggccatttataaattgctgtgggccatgttctacgcacaacaggataattatagtaaacaacataattatctgcgtgccacagaacaattctttttgactgataaagagttgaaagatcttccggctgatgcccggattgcggtggaagcgactcagaacacgtatcagatagctataaccaatcctgctgaaggagttcgttatgtgatcaataatgaaggacgtttccggacagaaaagatacctgcccgtgaagttaaaaactggttgtggatgcgtctgaataaccgttcggatgccgaatggcaaaagtggtttgcgttgttgaaagaatgtggtatttcgggtgtcatgttcgagggatacaatgagaatatttaccgcctctgcaaagaagccggattggaggcgcattattggaaatggacgatgaaccgcagggaactgctggacaagcatcccgactggtatgctgtgaaccgtaaaggcgagtcttgtcacgacaaacctgcctacgtggattattatcgtttcttgtgccctaatcaccaaggtgtggccgaatatctggcagaagactatgtaagggaagctcataaaccctacgtggatggtgttcatctggattatgtccgtatgccggatgtaatcttgcctgtcagcttatggaaaaactatggtatcgagcagaaagaagagttgccggaatatgactattgttattgtgatgtatgccgtgaattgtttaaagctaaaacaggacaggatccgttggaattaaagtatccgatggaaaaccagagttggattaatttccgtctggatgccatcactcgtgtggtggatgccatcactaaagcagtgaaagcggatcataaagctatttctgccgccgtattcccgggaccgtccatggctcgtcacatggtacgccaagattggggagaatggacgctggatgcttattatccgatgatttataataaattctattatgaaggtcctgaatggatcgggcgttcggtaaaggaaagcgttgaaacggtgaatggtcgtgccaagatatatgccggactgatgtttggtgatattaaggacaattttgaagaggcgctggatgaagcatacaataacggggcatccggtgtatccttctttgatggtccggatgaagaatatttgcataaattcaaagcttatctggataagagagggtttgtggtgaagtaaccctgggctgatagatccttatatcagagaaataaatctctttttagcggtcactttcgatttttatcgtaagtggccgcttttgcgttttatcgtttgtcctttcgatgagtgcggaaaaggaatttatgtatccctttttctgctttcttggatttgtcttgaaaatgaatgtgttagaataaaaaaaatggagttctcttagtaagagaaccccattccgctgcaaatgtagctataataattcaaatacggaaatcttttattcaggaatcagtctctgataaggattcttatgatatttgtttgcaaattatccatctctgattatgcgtaaatattttattgtcagcagtatatgtctttttggggttctcttactaagagaaccccaaaaagacatacataaaaagtaatgttttgatggtaacagaaaatagtatggagcttgaaaatcaagcgttcctttcaaatcaagacataacgggcgaagcgcctaagttactgctctgcagttcaatcgcttccggctcagacctggggtcaaatgaaggaatcacgccaatggcgggaataggaaaagaatatcctgaattcagttggtattacctgtatctttccaacaaagaactgaaacgctatatcagtgttttcagtggcaggaaagctgttcggcttcgtacaccatcaggtaccgtagaggagaaattcttttgtttcaaggtgttttcttacactgccaccgatcatagaaaacgtttcgagcaatgtgcttataccaaagaggaatataccgtgcgccgtgactctgcacggatcgtgaaagaggcttttgctaccggctccatccaaaaactgaatacgttgacggacgagaaaggaattgaaggcaacggttggctgtttgtatgtgcccccttggggcagttggaatgtattctgtctgccatgcttccccgccagtatctggtgacggactataacacccaccgtgcggcggtaatccctcaccgtcagatggaagaatttatctatttgtatgaatccatgccttacaatatcgagctgatgaaccggcctttggaggactatcttcagaaaaagcaacgaatccgtatcaccggtggtgttttccgggggaaggaaggatgcatcatgcgtttgcaccgcaatacaaggttggtattcgctttcggaaatatgacggtggctgtgagctatcttcatgcgtttccgtttgaaaaaattgattagtttaattaaagccatccacacatcccttgcaggacgatggatggcagataagactacagacgcaactaaggttgcaaatctatatattcagcagtgacattgaaacagggacaggttttttgcggattcaagtcatgatgaccgacaatcaatgccttgggataacgctgatgcagatgttcaatcagttttctcagagctaccttttgtgcttccgtccgggtatccttcggagtctttccgtcggcatccagaccacctatatagcatataccgatactgtgactgttatggcttttgcaatgtgcgccgatcattttcggtgggcgtccggcttctatagttccgtctgtaggaatcacatagtggtaaccacagcacttccagcccaatgaacgatggtagcggtcaatgtcctctgctcgcaaggcactgcccgccttgttggcagaatagtgcacgataatcaacgaaaccgttctcataaaccgcttccaagcgctcctccggcagcgcctgtaataagcagctcaatgatgcggacgatgtacagcagtacatttttccagttctttttcatacgctttgtctttaaatagatgaataatataagttccatgacgttaaaagattcgtggagccattttatattccatatctgcaaatgtctccttgagtttacgacacggggcaaacacgatgtgcgcgcccttgatgtttttcttggagaacaaagcctccgaagcggctccttcgcatttcagggagacactgaatgttccgaggccgtccagggtgacttggtcgccttgggcaagatgttcggataggcggttgaagacttcctccagcaccgcttccatcatgccgtgtgggaaaaagcggagatgttccgtcactttctttacgagtttcttatgcgaaactgtttcgttggccacacactttgcgtatactttcttgggcatcgtcctgtcggacgcatttcccatcgagaaaacgtggtattttatcataatgacggattgttttcattcgtggaagccgggtctttcctttggcggcattcaagtcgactgtgcctttaccggccttttcggccttcagggtggcggcttgggctatgcggcttgctacgggattgaaagcggcgcgggaacgaagattttggaagtcttctcccggcgtgaacacaatgttgacggcggtgatgttgctttctgtaaatttcttcaggtcttccgcaccttccgagcctatagaaatccagaaattacctaattctgccagttgtactttctttccctccagaagcatctctacaaggcactcgcacatatcggctattacaccttttaccgttccgcgagtgaatacgccattgtggtcggcaatgtgtttgacaaactggctgaatggcatgatttcagaaacttgagcttttgcatacgctttttgggcggcatcgacatccatcgggttgcccatcataaatacactgtaatcaatcataataaaataaagtttaaaagttttgtgtttccgggatgttcgttcatccttccgacacgacaaaattaatgcggggaaataccgtaaaaaaatctatttattatcgtttactaactgttgactgccgttcactagctattgactgaccgttaactacccgttgacgaatcattcaaacaataagcttatggataatgagacacacttcagcatcgtcttcaacatttatggaggcagcaaccagattcttcccaatgctacttccgccacacagaattattatggtgatgaggcggaactagagaaggatgatgtaagcaaggacaaggaacctgctttatctcccgaggctacgcgccttttctcttatataaataaggtggaggatttacgtatctatctggtacagatagtagaatgtaccaatgcggtggaactggccagggttatagttaagatgggcgaacgggaaccgaagattacttcggaagagatggtgaaggagcgttttatctcgttgttctttcctctcacacctttgttcgtatcgggcaagactgtcagtaatatccgtgcgcgtatcaataacgcttgggcaagacgaccgagaaagcggttatgaccggaggtgaaaaaccggtgacaagtgtggaaaaaagtaagatatgttcgtgggcaaagtaagttcacttactttgcgatttaagtctacttactttgctcgggaatatatcttactttttcgttaaataagcattaaaagataatccaatttttgacccaatttataaggaaactgctttaatgcggttttctttataggatgtgtcaaaatgagatgctaatcctaataaatccatgtttaatttacagcaattcattgcagaccatgtgatttgtcgtccgacaagtatgtttgcagcagatattgaagctaataaagaaacgcttcaagcagaaataaggaataaaagtgtatgcgtcataggaggtgccggttccatcggttcttctttcattaaagcagtcttgccgttcaagccctccaaactgattgtaatagacctgaacgagaacggattggcagaactgacacgtgacctgcgttccacatacggcatgtatgtacctgcggaatatcgggcatataccttgaactttgccgatcctatctttgaaaggatcttccgtgaggagaaaggctttgacattgtggcgaatttttcggctcacaagcatgtccgtagtgagaaggacaaatattcggtacaggcactcattgaaaacaatgatatcaaggcaaaaagattccttgacctgttggccgtttacccgcctaggcacttcttctgtgtctccactgacaaggccgccaatccggtgaatatcatgggagccagcaaacgtattatggaagatatgattatggcgtattcttccaagttcaaggtgaccaccgcccgttttgccaatgtggctttttccaacggttctttgccggatggctggatacagcgtgtcatgaaaaagcagccgttggctgcacccaatgatgtgaaacgctactttgtctctccggaggaaagcggccagatatgtatgcttgcctgcatactaggtaagaatggtgaaatattcttcccaaagttgggtgaaagacagatgctcactttctcttccatttgtgatgagtatataaaagcggttggctgcgagaagaaagagtttgcaacggatgaggaagcgaagaaatttgcttcggaaatggcatttaacaataaggattatcctgtggtgtattttaaaagtgacacgacaggagagaaagcctacgaggagttctatgttcctggggaaaaaattaatatggatcgtttttgcagcctaggggtgattgaggaagtggtgaaacggccgatggctgagatagacgcattctttactgaaatggagaatatatttgccgaaccggattttactaaggaagaggtggttatggcgataaagcgtttcatccccaactttgaacatgaggaaaagggaaagaatctggaccagaaaatgtaatttaaacgagtgaatgatatgaaagaaaaagtattggaaatagtaaatgaaatcagggtggcaaaagaattgtctgccataacccaacttcatgccgaagacaatcttcgtgatgacttggaattcacatcattcgatctggcagaactgacagttcgaattgaggatgaatttgacattgatatttttgaggatggtttggtaaatactatcagtgaagtttactcaaaacttcaaaagtaagatataatatgactgtatttttatgcgatggcgaatgtgagtactcttatgatgacttgctccgtcacctgaatcaggacaactattttcctttattaaagacgcatcaccttttttcctattttggcaatttggtcaaggcattgacaaacgacgttccgcttgtcttgctcgattcagatcttagccctgcggaacttgatggtgtggatgaaagcctggtcaatcagtctatccccctttctgtgaagcggttgccatccatgggagaagtgatagaagcgctagtacattcaacttctgaaataaccatgtttacttcaggcactaccggtcaacccaaaaaggtagtgcacagcatacagactttaactcgctctgtgcgccggggagaaaagtacaacaatcaaatttgggcgtatgcttacaatcctacgcatatggcaggtttgcaagtgtttttccaggcatttgaaaatctcaatacattaattaatgtatttaatcgtacccgttccgaaatcttcaatctgataaaaaaacactctataacccatatttccgccactcctactttctatcgtctattattgccctatgaaagagcttattcttcggttatccgtctgacgttggggggggaaaagagtgatggacatctttataatgtcatccgtcagatattcccgtcagctcaaataaacaatgtctatgcttctacagaagcggggtccttgtttgcggccaaaggagaaaactttcagattcctgcatcgattcatgatatgttccaggtagtcgatgacgaactcctgattcatcgctctctgttaggacaatccgacagtttcaggtttgatggtgattattatcattccggtgatttgatagaatggataaatcgcgaagagggagtgttcaaattcaaaagtagaaaaaatgagctgatcaatgttggaggatataaagtgaatccgggcgaagttgagaatgtgctcaatgccataaaaggcattcgtcagtctttggtattcggcaaagccaattcagttttgggcaatatactttgtgcggaggtgcaacttgaagaaggagtacggctttcagaacttgaaattcgccgtatcctgaaagacagtcttcaggattttaaaatcccccgtcgcatcagattcgtcgaatccttctcgttaacaagaacaggtaaattaaaacgattatgaatttcttagtaaccgggtgctcacgtggagtgggtcttgaaatctgccgggcgcttttacaacaagggcatattgtctatggagtagcccgctcttacaccaatgagtttaaatttttggaaaccgaatatgccggacgtgtatttttcaaaagtatcgacttaagtgatagtgaaaatgtacgcaagacagtttttagagaatttatacacaacggcatccagcttcatggatatgtgaacaatgcggccatggcttatgacgatattgtgaccaacctcaatttggaaaagctgcaagccatgtatgcggtcaatgtatttacaccgatgatgataaccaagtatgcacttcgtaatatgttgcttcatcataccaaaggttgtattattcacatatcttccatttctgctcatacaggttacaaaggactggccatgtatgcttccagcaaaggagccttggaagctttttctaagaatacggcccgtgaatggggtggtcttggtatccgtagcaatgttgtggtaccgggtttcatggagacggctatgagttccactctttctgaagaacagaaagaacgtatttataaacgcacctcgttaaaggctgccacatcggtccgttcagttgctgagactgtcgttttcttgttgtcagactcggcatgtagcattacaggacaaaacattcatgtagataacggaacggtttaagaagaatatgtatggagagtgtttataatataaagcaagttccaacttgtgaagtcaataagttggttcattttatcaatatgcattggaaacacaatcattcgcttgccgtatcccgggaattactcaatttccagcatctggacaaagataaggattgttacaatttccttgttgcggaaaataaagagaccggtgaatatgatgctttgataggtttcattccggttgcgcaatatgataaggatttggttggaaatggcgattattggggagcgatatggaaaatacgagatgatatttataactcggagttaaacacggtagctttctttttgtggcgcagcctcttcaaattaccatattttcactcctatgcggctataggtataagtgacattgccaggcagatttataaagtctcccgcataccggttgactaccttcgtcaatattaccttcgcaacagccgcataaagaattatcaaatagccttctttcctgtaggaagccagaatggttctgccatttccgatgaatcgtataccctgcaattggtccataatgtagaatgggataaaatagctataaaaggagaatacgctcccttcaagacccctttgtatttttgccatcgctttgcggaacatcctgtttaccattatcagtttgtcgaggtaaagaagaatggaatattggaatccgtttggacagtgcggattatgagagtgggcgattcatcagcctttagaattgttgatgtattgggtaaacttcccaatacatgtgtcaagggacagctgctcgatatactttatcagacgggagcggaatatatggattttatgaattttgggctgcctgaagagacctttacaaaaatgggatttgagctgttggatttggatggtgagacaatcgtccccaactattttgaaccttttgaacagcgtaatgtgaagattgaaatagcatataagacaaagggtgataattatgtcgcatttaaagcggattccgatcaggaccgccccaacatactctaattttaattcatactattatgaatgctgataaacttaccgtggtcatgtaccactatgtgcgcgatttgcaaaattcacgctatccccaaataaaaggatgcgatgtgcgactttttaaggaacagatcaaatttctgcagaaacactataattttgtcactattgaacaggttataaatgcatataggggggggcatagtgacaaattgccacctcatgccgtgcttctctctttcgatgatgcttatgccgaccattttgaatatgttttcccgattttggagcatgagcatattcaaggtgccttctatcctccagtgaaggcagttacagagcatacggtactggatgtaaataagatacattttattcttgcctctacacccgaagataattttcccgttttattgaatgagataaaacagctcattctggccaatacggatgagttcgggtcaaaatcatacgatgaatatttcaaggaactggcagtggctaaccgtttcgatcctgccgaggttatcttcgtaaaacggctgcttcaagtggctttgcctgaagcattaagaaagaggatggctgatattctgtttgagaaaattgtaggtattgaggaatctgcctttagcagggaactttatatgtcggttgaccaaatcaagtgtatggttgattgtggcatgcacattggcagccatggttatgaccattattggctaggctcattgtcacgtgagaaacaggaatttgaaattaagaagtccatcgaatttataaatgaagtgggtggggatgtcgacaattggactatctgttatccatacggtgaccgtaataaagaaaccattcagctgctgaaggaaaacggatgcaaattgggcatgactaccgatgtggatttggcagaccttactgaccatgaaggcgatgctatatttaatcttccccggttggacactaatgatttgcctaaagatgccaatgcgcctgtcaatcagtggtattaaataataattcaacatacagcaatgaacaacgctgaaatctgtgaattcattcaccatctttttggaacacaagattttgttcccctgagtgctcccaagtttatcggaaacgagaaaaaatacctcaacgaatgtattgatacgactttcgtgtcaagtgtcggtgcttttgttgaccgctttgagcacgatatggctgtgtacaccggtgccaagcgtgccgtagtctgtgtgagtggtaccaatgcccttcacatggccatgctgctagtgggtgtagaacgcgatgatgaggtgctcacccaagctctgaccttcatcgctacttgcaatgctgtcagttatatcggagcatatcctgtttttattgatgtggacaaagaaacgatgggactttcgccccgagctgtcaaggcatggctggagaggaatgctgaactgaaagaaggagtttgctataacaagcgtaccggtcgccgtgtaaaagcttgtattcccatgcacactttcggccatcccgtaaaaatagatgaactggcggatatctgccgtgagtggcatatcgaattggttgaagacgcagccgaaagtatcggcagtttttataaaggctgccataccggtacattcggaaaggtgggtgctattagctttaatggaaacaaaaccatcactacaggtggtggaggcatgttgcttttccaggatgaagaactgggcgcatacgccaagcaccttactacccaggctaagatacctcatcgttgggagtttcgtcatgaccatattggttataattaccggatgccgaatatcaatgccgctctaggttgtgcccagttggagaatctagaccgctatgtggcagataagcgtgagacagccgctcgttatgttgagtttttcaagggtaaggaagatattactttctttactgaacctgctgattgcaaatcgaattattggctcaatgcggtggtactaaaggataaggttgctcaacttgaatttttggaatatacaaatgatcacggtgtgatgactcgtccagtttgggaattgatgaaccgtctgcccatgttcgagcattgcgagacggacgggcttgagaacactgagtggctggctgaccgggtggtgaatattcccagttctgtaagattgtaacagaataatgaaacgacctttgattttagtcggtggtggcggtcattgtaagtcagtgatagaggctgccgaaagtgcaggataccttataaagagaattttagatattccttcacaggttggtgaagaagttttgggttataccattatcggtacagacaatgatagtatgtattgtagcagtatgaatactctttcctgcgagaaagcagcttaattaattactaatgcgaatcagtagttgaaatacctacttgattcagttagttaaaatgttattattcaattaattatctcgtttatttatttctcaatctccttgaaaatcagtatattagaagaataaaaccactcattattctaattatgattcccaaggagaaagagctaaaacttataaaaatatatatgtacatctgcgatatttaccagtcttcactgaagttttactgccagagattcagtaataatgcaactcctatctttacagaccaggaactgcttaccgtatatctgttttgcggagcctatcagcgatacttccaaatcaaagagatacatacattcactgaagaatatttgctctcatggttccccaacctaccttcttatcagacattcaactatcggttaaacctgatgagtgaggccattagtgaacttgtaaagcatctcattacattctttaaaccagaggattgcgattctatgacatcacttattgactctatgcctattattacctgtgcaggaaagaataaaacaggaaaggtagctactgaaattgcaaccaaaggatactgttctacaaagaacatgtattacttcggtctcaaactccatgctttagccttccgcagggaaggaactattccattcccggaaatgattctcttatcatcggcagaagagaatgacctgacagttcttaaaagagaagccgctgatagccttataaacagaaacatctttgccgataagatatactcggatttttcttactggggcaataagcaacaagaacaaggaactactatgctaactcccgtgaaagcaataaaaggagaggaaccagttattactcaaagagagaaagctggaagagaactgttctctactgctgtttcaaaggtcagacagcctatagaagcgtttttcaactggctgaatgagaaaacaaatattcaaagagcgatgaaagtcagatcaacatctggacttttagtacatacgatgggaaaaattgccatcgcattcatttatctaattttttaaaacaagaatcagaaatcaactactgattcgcattactatacaaaaatgaagaaatttagaattggttattttgccgatggtctttggggacattttactttagacactttactgaaggatgaaactttagaaattgtttttattgttcctcgtaatgataccaaagatgagtatctgaagaataaagccttagaatatggcattgattacttgatgccggttaaggtaaactcagaagagttttatcagaaggctataaattatggttgcgatttgtttgtatctatgagttacaaccaaatcttcaaacgcaaaatattcgatttgcctccatgtaaaacgatcaactgccatgccggaaaattgcctttctaccgtggtcgtaacatcttgaattgggtacttatcaatgatgaaaaagaattcggtatcactgtacactatgtagacgaaggcatagatacaggcgacatcatcctgcaacgaacctttcccattacagatgcagacagttacaataccttgcttcaagtcgcttacgaagcgtgtcccaagattctttatcaagccattaaagacattcaagcaggtaaagccaagcgcgtgccgcaagacatgatttctcatcatggactttattgtggaatgcggcaaataggggatgagttgattgattggcagatgacttcacgggaattgtttaactttgttcgctctatctgccagcctggtccgatggcaaccactttctgcaagggcattcctgtacttatcaatcaggtggaatataatgaaaattatccgcaatataaaggtattccgggacaagtcatcggattggagcatgcttgccctattgtaaaaacaaaagattcctacattaaaattgtgcaatacgaatcggaatgtaagttgaaagtgggagacagactacaaacgaatcaataatgaaacatacgcttattattgctgaagccggagttaatcacaacggttctctgaccatagccaaaaagcttataaaagttgcagctgaggcaggtgttgactatgtaaagtttcagagtttcaaggctgagaatctggttacaaaatccgcaaaacaagccgagtatcagcaacataatattggtgatggcaatacctctcaatacaatatgctcaaaaagcttgagctttcgcacgaacagcatgtggaacttttaacttattgccgtgagaaaggcgtgaaatttctctccactgctttcgattttgagagtattgactatctggcatccttgaatttgggcttttggaaaatcccttcaggcgaagttaccaattatccttatctggtaaaaatagctcagactggctttcctgtcatcatgtcaacaggtatgtgcgagatggaggagattcaatctgcttttgatgtattgacagcccatggcttgcagaaagagcagataactttgctccattgcaacactgagtatcccaccccgatgtatgatgtcaatctctccgccatgaatgagatgcgttctcagttcggcgtatcggtaggctattctgaccatacacaaggtattgaagtgcccattgccgctgtcgctatgggagctgagattatagagaagcattttacgctcgaccgttcccttcccggtccggaccataaagcatcattagaacctgatgaattaaaagccatggtaactgccattcgtaatattgaacaagctatcggcatgggatacaaaaccgtctccgcttccgaacgtaagaacaaagccgttgcacgcaagagtatcgtggctgctcgggacattaagaaaggtgagttgttcaccgaagagaaccttacggtgaaacgtccaggcaacggtataaatcctatgcggtggcccgaaataataggcaagagagctgttcgtgacttcaatgaagatgaattgatagagatatgagaaaaatttgtgtagttaccggcactcgtgccgagtacggattactcagcaggttgatgcgtctaatcgatgaatcagcagattgtcagcttcaagtcattgctaccaatatgcatttgcttcctgaatatggaaatacctatcaggagatagaatgtgacggttttcatattgatgctaaagtgcccatgagaaagctgtccgatgactcttatggggtgattgattccatggcagaagagatgaaaggtatgaatgaagcacttctccggctccatcccgatatggtggtaatcttgggagacagatatgaaatgttggtgacggctaccgttgccatgttgcaacggattcccatagcacatcttcatggtggggaaatcagtgaaggagccgtagacgatagcattcgccatgccattacaaaaatgagttctcttcattttacatccactgaagattatcgtcgtcgtgtaatccaattaggtgaacagccggatagagtattctatgttggagccattggagtggaaaacttgaagcaaatacctttgatgagcagacaagacttggaagattcattaaacttcactttcgatagaaaaatcattttagtaacctatcatccggtcactttgggcaatcgtagtccgaaggatgagatcgatgattttctgtttgcgttggatactttccccggactgaaggtgcttttcaccatgcctaattcagatgagggcagtgaagtgatacgccaggctattgagggctattgcagtcggaatagtgaccgttgcagttgttacagttcgttaggtctgaaacgttatctttcagctttacagtatgtaacggctgtagtaggcaattcctccagtgggttgcttgaagtaccttccgttcatattccgacactcaatattggggatcgtcaaaaaggacgcgttcacggaaattcggtgctcgattgtgcaagtgataaagaatctattataagggggcttaccatggtgctttctttatcatttaaggaagtcgcattgaaagcttccaatccctacgaaaaagagaatacggcacaatctgttttcgatgtaatttctacatatccgcttgatgaactgaaacggaaatcattttataatctatagaagtatgaatatattggttatcattcctgtccgagggggaagtaaaggcattcctggtaagaatattaagatacttggtggcaagcctttgattggatatactattgatgctgcaagagcagtcaccgataatgatcatatttgtgtatccactgatgatgacagaataattcaagtagttgaacaatatggattgaaagtgccatttaaacgaccggaagaacttgctacggatactgcgggaacatacgaagttcttcttcatgctttgaattattatgaatcaaaaggagaaacttttgatgtggttgtgctgcttcaggccacatctccttttcggacgggtaatcacataaaggaagcacttaagttgtattccaaagagattgatatggtagtcagtgtgaaagaaacggattctaatccatattatatttgtttcgaggacgatgccaatggaatgttgcacatttcaaaaggggatggacattatacccgtcgtcaagattgtccaccggtttacgaatacaatggtgcaatttatatcattaatcccgatagcttgaagcggatgccactttataaattcactaaacgtgtcaagtatgtgatggatcgagggcattctattgatcttgatacaatgatagattggcagatagctgaatacatgataaataaccatctaatataattgaaataagatgaatcattcccatatcatctcccaatccctttccatcattgattccatccgttgcatcaacgagattcatggtgaaccgttagtgctttttgtggtagatgctgaaaaaaggatgcaaggtacccttaccgatggtgatgtgcgtcgtgccttgattaaaggtatagatgtggatgctcctattagtgaggccatgcatcgtaattttaactttttacgtcgcggagtgaacgatggtgtggaggatattcaccgccaacgtgatttaaagatgcgtttagtacccgtacttgatgaagagaatcatatttgcgaaatcatcaatttggaacattatataaccaaactacctattgatgctgtactgatggcaggtggtaagggggagcgccttcgcccgttaacggagaaaactcctaagcccctaattaaggtaggtgacaagtgtatcattgattataatattgatcgtttgctttcatacggtttgaatcatatatctgtaacggttaactatcttggcaaccagattgaggaacatttccgggaggaacgcgatggggtgaagatagttactgtgcgtgaaccgaaatatctaggtaccattggcagtatcaagttcgtggaaactttttacaatgatacggtgctggtaatgaactcagacctctttacgaatattgattttgaggactttttccttcatttctgtcagcatgatgctgacatgagtgtggcagctgtgccctacgtagtgaaggtgccatacggtgtgttcaatctcgaaggacgagaaataaagggcgttaccgagaaacctaccatcagttattatgcaaacgccggtatataccttatcaaacgcaaactgtttgaccttattcctgatgatatcttctttaatgccactgacttcatggataaactcatagaacagggatacaaggtgattcgctatcctattagtggatattggctggatattggtcagcatgatgaattggcgagagcaagagagatggtgaaacatttgaaataaattaaaaaaacaacatacaatgtataaaattgcagttattggtgccgggcaattgggtagtcgtcatttacaaggactcaaattgtccaagctgaaatctgatatttgggtggttgataataattcaaattcacttcagatagcgcaacaacgttatgaagaaggtgaagtgaatagtaatcaaactatttattacttacaacttatcgaacaattacctactgagttagatctagtagtcatagctaccagttcgaaaccacgattaacgattttaaaaagtttacttgcaaaagtgaaagtgaccaatatcattttagaaaaattcttgtttacaggactgactgattatgatgaagccgaacagttgttgcagatcaatcacgtcaacgtatgggtaaactgtccgcgacgtctatttgacttttatgtagaaatcgattcaatgatagataagcaaaagcctcttgttatggagtatactgattctaattggggattatgttgcaattccatacacatgatagacatatttatgatgctgtcaggagaaaagacttataccgcctgttttgatggaattatacctcaagttaaggacagcaaacgtaatggatatatagaattcaacggcaccgttaatgtattaactcctaacggaagtactttacgactggcttgtgtggatgatgatactgttcagcatcagatgactattatcaatggctctcatcatattattattaatgagccggaaggatttatgtctgttgatggtaataaacagcccgttcatataaaatatcagagccaattgactggtgcagtagctgatgaaattctgctaaatggtaattgcaaactaactacttatttcgagtcgtcaaactatcataaagtattcctaaaaggtatactggatgtttataataaagtaacgggcgagatgcatgatagatgccctattacataacataaaaggtgattatatgatttggattataggaacaggaaccattgcattggaatatgcaaagatattgaatcaattgggacatgaatttatagcagtaggacgtagtggtaagaatgcagatgagtttattgaggccggagctaaagaggtagtttctggtggattaaataattacctggcggcttctccaactactcctcaaaaggttattgtagctacaaatgtagatcagttggctgaagtcactgtaagtttgctgaactttggtataaaagatattttggtggaaaaacctggattttgccgtcccgaagaaattacacccgtagttcagttagcacaagctaaaaatgctcatgttcttctcgcatacaaccgtcgcttctattccagcgtattggctgctgagaagattattaaagaagatggtggaataacctcttttaattttgagtttactgagtgggggcatgtaattgaaacattggattattcgcataatatcttcgataattggttcttcgccaattcttctcatgtagtagatcttgcttttttcctaggaagcgaaccccaagaaatttcttgttttagtgcaggggaattgtcatggcataaacctgctgtattttcaggagcaggtatcactaacaagggggctctattctcgtatcaagctaactggaatgctcccggtcgttgggtggtagaagtattgactacaaagcatcgtttgtattttaaaccgatggaaactcttcagatccaggaaaaaggtagtgtggctatcaagcctgttgaaatagataatcaattggatatagattttaaacctggtttttatttacagactaaggcgtttgtagagggagattatggaagattttgtacggtggagaaacaaatgaaacatataaatactatttataagaaaatagtagaaaaataatgtaagcactcaaattaatactcaatttaaaaaaaatctatcttcgctgcaggtaaattttaaaaaatatgtattgtaatgaaaatttagaaaggttttgctttcagtactaaacaaaggccttttccccatgggaacccctctagtcgtcctatgtaaagaataaaattcctataacactctaaagtgctctttcggaatggaatatcctaaattgagcgcttatacaactaaaactattttttaattaattattaatcgatcagttctatgctttgttcatttttagcgaggtggaagagtttgatagtttacatttgtagtaaaagataaataaaatgcatcttttgatttgtaatagtaatatgtttattcctatagtacttactacagtactaaataattccgatcagcgttatttgatttatgttgatatacctagtatatatatgttctttgacaaattaaatttgccggaaaattgtaatcttctaaaataccctcattatattacctgaattcaaacagacaatgcaacagtgtcgaattcattgttagttaataatttatatttttcctttggggtcatgtaacccaatctttttctcggtcttgagtttaagatgttttgaacgcgcattacctgttcattggttatgtccctaaagtccgtacccttcgggaagtattgcctaatcaaaccattgctgttttcattggctcctctttcccacgagtggtatggttttgcaaagtaaacaaaaatatttagtttacgtgcaatttcttcgtgaaaactaaattcttttccattatctgccgttattgtatgtatttggtctctaaaaggttccaaggcatcgatggcagctttagttagcgggctggcatctttcccgctaagtagtcttatccatactagtccagttaccctgtcgtttatagttaatagtgctcctttgtgattcattccaatgactgtgtcaatttccaaatcaccaaaacgtactttcttgtctactatcgtaggacgcttgtctatgtccacgcggtttttgataaaaccacgtccattagtcaatgcacctctcttcttatgacttcttccccgtcttcttaaatgcttgtataacaacttatctccatgctttttatcttcccaaatatactggtagattgtctcatgagaaactgtttccaagccctttgttcgcataaacccagtcacttgttctggactgaaatctttctttatgagtatatctacttgaattttcaagtcgtccgtaaacttcacgaagtgctttcgtgaacgcattctggacatatacttagcctgagcgagatccggtttgtaaatgccattacgtttatcactattacgacgtaattcacgacttatagtgctacgatgaactcctacaagattggcaatctcggttcttgactttccgctttgcagataagcggaaatgttatacctttgttcttcggttagctgtttcatattgcaactgaatgttggggaactggaagatgcaaagaaacaacttttccacaggggaacaaaagggaaagaaatcttctttctctgttcctctgaaaaattattcttttcgtatcttctcattgtcatcattctcactcctgttgcattatccgcttgaacttaggttaattggaagaatgctaataaggcaaaacaatttatatggaatcaacttgagcatatagatattaaaagtattacgttttatcatacagcatatggtgaacttgcaacttggctaatttctaaatatagtagaaatacaacgatttattttcaatcaccttttccttctttttgctttaaaaaacgaatttcgttaaaggcactaaaactgtttctagtctataagattatttataatactgatatcataccaatggattctggtaataacacattgccttctatttctcctaagttttttaagaagaataatgtaattaataaaaatgctatggtagataatgatttagtttgcaattatgtaaatgaaaaacttaatttgaataataataaccgttccattctattagttacaggttcgaatattacagccggtttttgtgatgaaactgattatgggaaaattataaattctatattatctgctttaggaaaggataaatttatggtaaaatgccatccaagatttgatgatttattatcgattgagaaaatgcttcctgctattcctaagtatattccaggcaacgtcatccttccattgtttgattgctatattggattgtgttctgctttgctgattgaagctgcaaatgttggtaaatgcagtatctctattttaaatctactgaatatagattttaaattgaaatcagttttaaaagattcgttagaagtgagactaaaaagtggatctactatatattatcctaatagtattagtgagcttaacgatattgtgaaacgttcatgtaacaataacataactatgatataaaatggggagagccaaacagttaggaaagaatacgctgttagtttttattggaagttttggcgcaaaaattatctcatttatcatgttgccgttttacacgcggtggctaagcgtaactgattatggcgtagtagatatgatatcaatataccaatcgcttttaaccgattttctaacagccgctatttcaacttcaatatttatattccccaaaggggtagcatttcatcgtcaaaaagaatatttttcttcaggcttgatatttgctttttttgcatttatagtagctgcacttctattttatatagttagatcaagttttaatctattcagcgtaagcaatagttttacagattatactgtttggatttatataatgatatttattacattcattcagacgtatttgcaacaattctgtaggagtatagataaaatgtatgtatttacattgataggtattcttctcacattatgtactggtatcttttcttttatatttatacctaaaaacggcgtttatggatatcttattgccatggtattgtcaaatgtagtagtagccattacaactttttttatagcaaaattatataaatatgtttctttaaaatccttcaataagatttctttaaaagaaatgcttaaatactctattccaactattcctaatgttttaatgtggtgggtgttgggttctttgaatagacccatcttagaaggtacagtgggactttctggtatcggtattttagcagtagcgcaacgttttccaaatgcagcttcgttagtgttttctatattcggtaattcatggcagatttcagtattggaagaatacaaaatgaacgattttcccttgttcttcaatcgtgttttagccattttttcaatcattacatgccttggagtgctcatcctatcttatatttccgattggctggtaacttttattgtaggcaataatttcttatcttcgtctacttatataccgtgtctttcattagctctctttttcttatgcatgaatacgattattagtcccatattctctgctgtacgaaaaagtaagtattatctgtattcaagtatatggagtgctgtgctgactataggccttaatattttgttgattccgttaattggcatcatgggagcttgtataagtattgtttgttctcatgcactcatgacattgttgagggttaaatatactttgatttttgtttctgtctacttaaaagaacagtatttgttcttaggtttgttagctgttgcttttattgtagcgttatcgataggcgattctttgatgtttcgaacaatggcacttttagtagcatttctcggcgttgctctagttattcgtaattttgataaacgtcttaatattaaatttttagctataaaattattcaaaaataaaatcaaatttaaacaatcatgataacattacgtggattatttcgagatttaaaattcctaataggatgtttcgtgtatcttgtaaaacattactctcttttctctggccttaaatttcaaggtcgccaagaacgaatcgtgtatttgttatgtaatggaccttctttaaaaaatgatatggagactattaaaaagctgaaaggagttgattttattgtggtaaactttatggccaacgattctcttttttgggagattaaaccacaatactacacattgatggatccgttgttttttacaaataggagagagaatagatatatggaaagattggaggtactatttgattccttcaatcgtattgattgggaaatgataattttcctacccatacaatatgaaaagtcctttcgtgagttttcaaagattaataatccaaagattaaaattatggtattgaatacgttctcatcatacgttgcctcggataatgtaaggcatttctgttatagaaaagggtatgctatgcctaatgcgcaaacagtggctattgagtctatttttgctatgcttaatatgggatatagtactatttatctttatggtgttgatcatacatttctcgaaggtttgaaagtaaatgataagaatgaacttgtacatgtataccagcatttttatgaaaatgaaccaaaaataatacctgtaaccgatgcttttggttatcataattcacttactaaggaattgcaaaccatagtcaatatttttgcttcccatgaacagtgtcgcaaatatgctgatcatctgggtgctaatatttataatttgactaaggggtcacaaattgatagttacgaacgtagataaatgagagaagatgaataactttaagattgatgtgttggagagacttagtacaaaaatggctaagtatctagatcaaaattgtttttgtattaaggataaatattatacttatcgggaactttctattttaactgcaaagattcaacaggagataagaaatcagtatactgaaacgactccggtaggattggttaataatgatgatatttatacctatgcttctatcttggctttgtggtatgaaggactggcttatgttcccttgcatcccttgcaacctattgctagatgtattgacattatcgaacaagtgaatattcaattgattattgattctacagagatgtcacgctatgtagataaatataatgttctatatccacaaaataattccaatacagatgttgtattccctgtcattaacaacatagatgatgaagcattgtgctatattctatttacttctggtagcacgggtaagccaaaaggtgttcaattgaacagacgtaatattacttcatttgttgccgcttttgaaaatgctggtatcgttttatcccatgaagatagatgcttgcaatgctttgatttgacatttgatgtgtctgtacagtcttatttgatgcctttattaaatggagcatgtgtctatactttaccattagattgtatgaagtatgcttgttctgccgatttaatagaacgatacaaacttacatttggtgctatggctccttctatggtcagatttttaaaaccgtattttgatgaattggatatgtcatctcttaagaaatgcattctaactgccgaagcttctaatctctccttggtgaaagattggaaaaaatgtgcgtataatgctgaactttatgatttttatggccctacggaagctactatctattgtacttattataagttgcctgatgacatcaatcaaactaaaaaccgaaatgatattctgtttattgggaaacctatgagtggaataaaagctgttcttatttcacccgatgggatagtcctgaataaaggaattggtgaattgtgtgtggctggtgaacaagttactcctggatattggcagctttttgaaaaaaataaagaagctttccttactatatccattgataataaggattatagattttataaaacgggtgatttgtgtcagtttgacaaggatggagatcttgaatatattggaagaattgattttcaggctaaggttcaaggttatcgtgtagaacttggtgaaattgaatgtaagattagagagtttactaaatgtgatacagtagtgcttgccatcaaggaagataataatgatgatattctcgttggttttgttgaatcaagattagttgacgaaaagcaagtctatgtttatttgcgtgaacagttacctccatatatgataccaaaatctatcattagtcttgctcaatttccactaaataacaatggtaagattgatagaaaacaattgattgaaatttttaaaactcataataaataaaataatggaaagacatgatatttatacttctctaaaccagattttagggaaaataataggtgatacaaaactggatctaaatgagttgactactacagatgaaatttctggttggagttcactcgtacaaactcagttggtcgttgaaattgaaaagcatttcaattgccgtctgactctaagggatattatgaaaatagataagaatatatcttccattgtaacattgatagataataagttgcaatgaaaatccttagtttgattcgaactcttaagtcggtgttatatgcttatgattctgaccaatgggaaaaacgcgtaggggctttaggaaaagatagttatcttagaggacctatatcttgtgctaatcctagtttaatatttgtaggcaatcactctcatatatttggacaagctaactatatcatcagaaatgggaaattcatagttggtgattatacagggatagcacaaggattgactgttattacaggtaatcatatttcagagaaaggaaaactgtttaatgattgtttgcaactggatgagcaagatgttattattgaggatgatgttcgcatcggtgcttttgtgactattttgcctggagtgaaaattaggagaggtgctataataggtgccggaacagtattgcgtttttctattcctccttatgctgttgttacaggtaatcctgctaaaattgtgggattcagaatgaatccgcaagaagcgcttgaacatgaagcggctctttatccggaagaaaaacgcttgtccgcagatgaattatttgataattatgaaaagtattactttaatcgaatgagtgagataatagaatatctaaaagtataaaatacaaaataatgaaaattactgccgttattcctattcgcagtggatcacaacgtgtcaaggataaaaacttgcgtgcctttgcggatactaatttgatggaactgaaaattaaaaatcttctgcaagttcctgaacttacatctattgttgtaaacactaattcggagttagcaatagaaattgttaataaaagttatcggggggggggtgactactcaccgtcgtgaagagtattacgcctcttcacaatgtagcggaagtgaattttttagacatttaggtgaagtgacagataccgatctttttgtctattgcccctgtacttcgcccttcattaaaccagaaactgtatctcagtgtattaatcaatttatttctacttcggattacgattgcttggctactgtttcgtctgttaaagaatttctttggcttgatggtgatccgatgaattatgaccctgctcatgcacctaactcccaggatctccctgatgtggtggcgttgaattttggtgtaacagtagtcaggaaagaagatcttatcaaaaactccaatatcatcggtaaaaatcctcaattcgtcaagacaagcgatattgagtccattgatattgatactcctcttgatttctatattgctgagcagctttataaaaagttagttatagaaaagaagaggctgctggaataagttttgggattgattggtatttcgctgaatgatgcagatataaagaataactcattatatttatggataagattatagctattattcctgcgcgataccaatcatcacgctttcctggaaagccattggctgatatttttggaagaccaatgatttggtgggtttacaatcaggtaattaaagtaaaagaattcttagaggtttatgtagccacagacgatcaacgaattgctgatgtgtgctcgaattatggtatgaagtttatcatgacccagtcaaatcatccaactcatgtgcataggattcatgaggtaagtgataatattgcagctgactattatgttgtagtttgcggtgatgaacctttgattagcccggatataatagaggctgtttttccttcgcaagatgttgataatagtcatatgtatgttggtggtctctgtcgatacttcacagaaccagcagaagttattgatcccgcaaatattaagattgtgactaatgattcagatgaatgtgtattgttatcaagagcacctattccgtttccttataagactgtgctttttaaatataaaaaagtggtgggtgtggaatgctataataaacaagctttagatttttttgtctccacacctaaaggctatctggagaatatcgaggatgtaacacttcagcgatttttggagaataagattcacatcaaatataaattggtggattcagtatctctttctgttgatacccctcgagacttggagaaggtaaaagaaataatggtgacaaaacaagcttgaactatggaaaaaaaagtattaatgttagattgtacgctacgtgatggtggctatgtcaatgattgggattttggtcatagtactattacgggtatttataagcgattggaagcagcaggtgctgattatattgaagtgggtttcttggatgacagaagagaatttgatataaatcgttccatcatgccaagtacagaagctatcaataaaatctttggttctgtaaaaaaaggaaaagcgatacctgtagcaatgattgactttggcacttgttctcttgatagtataggttcttgtgattctacttttattgatggtattcgagttatcttcaagaaagaaaaaatagatcaagctttgccattctgtaaagctattaaggaaaaaggctataagctcttcatacaagccatttcaattacagcctatagtgacattgaaatgcttgagtatgtaaatcgcatcaatgaaattaaaccttatgctttttctattgtagacacttatggtttgcttgataatagcagtatggctcgatatttctacttgatagacaacaatttggaccctagtattaaaatggggtatcatgaacacaataacttccaattaggctttagcaatacaattaaatttttggagaaaagtaccaaaagaacattggtggcagattctacggtttatggcatgggaaaaagtgccggaaattgtgccagcgaacttttagcgatgcatttaaacgaatattacggagggcattacgatttaaaccagttgttggagattgttgatacagatttgatgccgatttatcagaaacattattggggctacaaatatgatttctacattgcttcgatgcaacgatgtcatccgtcctatgtccagtatcttctcaaaaagagtacattgatgagtcactgttgaataaagaatctgaaaatcctgataatgctcttgttttgttgcttaaggctttaataagaattggaatcacagaagtatatcttgcaggttttgatggatttaccaatacacctaatgattattatgatcgcgattacgaactttcatcaactaaagatgaaagttataatcctcaaatccgcaactacgcgcctaatatgatacagaagcgaaaagaatctgcatcgttagtaaaaagggggcacagtgcatcgaatgtcaccataaagacatataaatgccccttaccccaccatgcgacttgaggcaatacgcaaaatcacgactataagttgtcggtgttatccaaagtcattctggaacacattggcataagcattgttgcatgaatagatattcagcacatacttccttgatgtcctgacccatttggctggcacagagatgaacttaaagacaaacgtcttgatgcggcttgttgctttgagtccgaacctcttcacgtcaagcctcgccatgatgaatttatagaagttgcgtatgagtgccataagcagaagaaacaccgtgttttctcccataaaggattttggaagcctgttccagccgaatccgttattcatatcatcgaagatgcgttccttccctccacggaggttatagaattcgacaatctctttctcggaagactcgtagtcatttgtaaggatgcagcggtaggtgtattctccttcccacaggtcgagttcgccgtctatccgcttctgtctttgaatcacaagacggtatgccttccctttccatttctcgatgagaatggaggccagctcaaactcaatgccgcccaattccactttcttccaacctctgagggcaaagatgtcattgtagagcgaactgcatcggttagcacggatatagaaggtcttgcagtgtttagcaatctcttccactatctcttcagaacacgagccgcaatcagctctgaaacggttgataataagcttgttttgttcaaacctttcaaagaacctcttcagcgtgtccttctggtggaaacggacatttgtgttgccgtcgctgttctcaatgccgacaatcaagttgccaataaccgccacgccagggcgataaccaaggaacttcttgtatgtaggcttcgcatcaaacttctcagcctctatgaactggtggtcgaagtcaacgtcatacccctcgccctctttcagctgccctgtggacaataggcaattgaggagcagtgtattcagcttgtctgccgtgttgaagtcgtaggtcttgccagtgtcggatgtgtaggaaatgttatcctgggtcagttcctttatggctctaagaatcgtgtcggcactgcatgtgcgaagtgtcggatgaagcgaaaggtggtacatcagatgagtggtgacatcctcgatgcatgagccgccacaaaaataaacgctcataagcgaacggatgatttcgctgtattgataaccatacagcctgcatctcataccgagggttgagtcgattacagatgagagtctggagtcaaattgctccattattgaaaatattcctccaaaaggagtgagtttctcggatttaattgctacctttgccatgtctgtcgggtttgatacatattttgatttgcaacactaagataggtgaaaaatctgacatggcaaattcctgagcaactttttgttgctcaggtacttaaaaagttatatttgtaatagtgttgcggaattaaggataatgatcttttgtcagatgatttatctaaaataaatcagtcaatccgtcttcatttcattacagaaagtttgtatgatgtcagataagcaaactattaaagcggtcctgtttgatttggatgggactcttttgaatacaagtgaaggaatagcatgtagtgtcttgcacacgctgtctgtaatgcaactcccctctatatcctctgacgaggtatcaacatttataggcccccctattcaagaatctttaaaacgtcattttagattatcagatgaagatgttcaaaagggggcggatatatttcgtgcctattataaagactgtgctttgtttaaagcagctttatatccaggtatcattgacttgttgaaacagttgaagcaaaaagggtttcttattggagtagctacatataagcgtgaagattatgctatggatattctaaagcattttggtattttagaatattgtgatgtcgttcatggtgcagacaatgataataaactccgtaagagtgatattgtttatctttgtatatctgaaatgtcagtggataatagcgaagtggttttagtaggtgatacatatcatgatttggaaggagcagaagaggctgatattcattttattgctgtaacttacggttttggttttagagaaagtgtaagagaactttctaataaaaacgtggtgggagtagctgataatccaatggaaatagaggggctgctgaagtgaatttcataatagaattctatctcgttagcgtccaaaaatgacgtataggataaccgataaaaaagtcagacctttgctttcgttaaatcaaaatccaagtttatgtatagttacaatgattttgagcgtctatttttgcgctataaattggaagggattcctgctggtgtttctacataaaaattttgtatgtccaaccaagttccttataacctattttccaaatggtacaaggatacccggaagaagataattcccgttctggttttgggtgctccctcaacggaatcggaaatgccggaaagtccttcgccactcccggaacaaaagtcagaatcggatcctcggcttttttgtcataccgaacttcgaatcctggtggatatccgcatgagcaatggtgttcatatcagtcagaaaaatttaagcaacgaaggtaagcagtcaaaaattggctcataatttaaacctctatcttcgctgcgaacaaaaattttagaatttatgtatagcagtgaagatcttgaaaggttttactttcagtaccagaccgaggctttgcctcatggagaatctctccaatcgttttgtgttaagaacaaagttccttataacatctttcagaaatggtacagggatacccggaaaaaagtagttgaagtccaggttgatggtgctcctgtaatcggtcatgaggaacaatccagtgccattgatcaacctcaaccggtatcaccaggcagaactgatcaccctgttcgtatttgggttgagattcgtatcagcaatggcttgcatttgtcccaaaagaatttaagctatcaggatttggttcgtatggtagagaaactggaggggttatgctgagtgttaccggtctgaatcatttttattatgtccgtgatttcaccgatatgcgttgtaagcacagccgtgtgctgtctatcattcgtgaacggcttcaccgtgagcccaatgatggagacgtctttatagtcatgtctcgcaatcgcagaatagtccgtatgttttcatttgataatcgttcatatagtctgttcgaaaagaagtttgtagcaggctatcagttcatgaaagtggagcggaacggggcagatactgtttatcggattgcctggaaggacgtggttttgattcttgagaatcctatagttaaaacattaaaaatcagataatcaatctatttatccacttgtggctttgcgattattttattacctttaatgctgtaactcaaaggtttaagtatgatcgatctgcaagatataattaaaacaaaacgagagttgttgagtagggaaacctactcacgcaaccctataaattatagcgcaggtatggcagaggatcagaaagaccgatacatacaataccttgctgagcaaaatcaggatctcaggttgacaggtgatgccatgaagcttgttttagaggattttatggctcagatgaaagaactgaaggctcagatgtcatccatgcaatcgaaacatgctgaccttgagaatcggttgtcagaagagcataaacttcgcaaatcggctgaacgtaagataaaatcacttcaagaaaaacttgattatgcccatcaggaacattttggtgatagacgtcaaaagatacaatctaaagctaaaataagtgattcagaccgccggaaggagaaggatgattatgatggaaccgatgatacgcttcgcacggattcggttggtcatgttccatcccaagagttaaaagagccttccgggaaagaccgtgacttgtccaatcgccctgacggttataaaacgatgagggtagccggagaggcgacagagcatccttctgatttgacaaaggttcccggtcggatcattgaaaggagaatggtacgggtgttcagtttccgtactttccttacggaagaatgttttgagatggttcattatgcagagcctggtaaaaggccgaagtagggctatttcccttctgaaggccatccggatgtagtaaccagttttgaaggtactaaggctgctcctgaatttctgcaggctatcgcctacgaagtttatgtaaagaatgtgacttttggtcttcttcaccaatggctgacagatacgggcatgaccatttctaaaaacacgttgcgcaactggcttaagaaaggtaagacatacctggacgaactggtctgtgtattgaagtctatagctttggaaaaagattcgatagtgaactgcgacgagacctggtgtaaagtgcgcaaatacgatcactataagaagtgctacatttgggttctggtcaacaaggcccggaaaacagccattttcttctatgagaatggctcgcgtggtcgtgatgtacttacagactttttgggcgatgcagaattgaagagtataatgtccgacggatacaatgcttatgtatttatcggcaatgagctgaactcaggccggtttaaagatactgtacaccaggtttgtatgtcacatgccaagaacaagtttgtcaaggcttccaatcagggtagtgaaccgaatgcagaacgcttttccaaaattttaaaggagttctttatgagggagcgtaaatacgatgatgccggattaacttcccaagaacggttgcgggaaaggcaaagtctggaaacgaaggagctgctgatagagctgcgcagcctgttggatagtgaacagtcaaaggattcagaatttagaagccagtattatagagaagctctcaattatctgaaccggttctggaaagagatctttgcttacttggatgatggtgaattaccgatagacaacaatctggctgagcgaactattcgaaagctgaccactcaacgcaacaattcacttcattatggtagtgataccggtgctgagatggcggcaacctatcacagtgtgattggaacggtaaagcttcatggcagttctatctggaatttcatcggaacttttttcaaaaatatctttaacgggtgcagggattatgttaacatggttcctgacaaaatcactttggctacaagccaatgttaaattcaaaactaattttttaacaaaactcagtttagggcactgaaaagtgccctttcgaagggggatgccctaaatcgagtgcttacgcaacgaaggttagttctatctctttactacctgtaactcaggtagtaaaagcttggtgatccaaatttcggacaattactcagtacttccaacctgcttccagtcaaaaaacggtacgaataatggtgaatatctatataagcaatggcgttcacatacagcagtgtaatttgagccacgccggtttgaaactgctcgtgtagaagttgaaggttttatgttgagtgtgaccagattgaataaataaaaatacataaaatgaaagatatagctgtgttattaactgtatttaataggtgtgagaaaacaatcagttgtttgaaaaacctgtatgcacaaaaactccctaaaaatgtttcttttgatgtatggctaactgatgacaattgcactgatggcactcctttggctgttgcaaaagaatatcctgaagtacatattttaacaggtgaaggtatccttttttggaataggggaatgataaatgcatgggaagctgcagctaagtataaagattatgatgcttatttatggttaaatgatgatacgaatcttaataagggagcattagaaacgttggttaaaacagctgatgaagccggatggaagaaaattatagttggttcttgttctaaaatagataatccttcaattataacttatggtggtaggaatgcaaagaagcatttgcttagacctagtttaaataaagcaattgaatgttcattttttaatggcaatatagtattaataccgcaatttgtgtataaagttttaggcaccaatgaccctgtctttcatcattctttaggtgattttgattatggcttgaggggagtgaagaaaaatattcaatctttaatagctccaggcatattaggtgaatgtgataggcatgaagcacttccttcatggtgtaatcctcaaaagacattattacaaagatggaatgcatttcattctcctttaggatgtaaccctaaagaattctttatttttgaatttcgtcattatggattcttgagagcatactttcattatatgactattcatataaggttattgtttcctcaattatggaaaactagaaaaatataataatatgcagttttcggcaagggtaaatgctaatagtcaattttttatgataatccttaattccgcaacactattacaaatataactttttaagtacctgagcaacaaaaagttgctcaggaatttgccatgtcagatttttcacctatcttagtgttgcaaatcaaaatatgtatcaaacccgacagacatggcaaaggtagcaattaaatccgagaaactcactccttttggaggaatattttcaataatggagcaatttgactccagactctcatctgtaatcgactcaaccctcggtatgagatgcaggctgtatggttatcaatacagcgaaatcatccgttcgcttatgagcgtttatttttgtggcggctcatgcatcgaggatgtcaccactcatctgatgtaccacctttcgcttcatccgacacttcgcacatgcagtgccgacacgattcttagagccataaaggaactgacccaggataacatttcctacacatccgacactggcaagacctacgacttcaacacggcagacaagctgaatacactgctcctcaattgcctattgtccacagggcagctgaaagagggcgaggggtatgacgttgacttcgaccaccagttcatagaggctgagaagtttgatgcgaagcctacatacaagaagttccttggttatcgccctggcgtggcggttattggcaacttgattgtcggcattgagaacagcgacggcaacacaaatgtccgtttccaccagaaggacacgctgaagaggttctttgaaaggtttgaacaaaacaagcttattatcaaccgtttcagagctgattgcggctcgtgttctgaagagatagtggaagagattgctaaacactgcaagaccttctatatccgtgctaaccgatgcagttcgctctacaatgacatctttgccctcagaggttggaagaaagtggaattgggcggcattgagtttgagctggcctccattctcatcgagaaatggaaagggaaggcataccgtcttgtgattcaaagacagaagcggatagacggcgaactcgacctgtgggaaggagaatacacctaccgctgcatccttacaaatgactacgagtcttccgagaaagagattgtcgaattctataacctccgtggagggaaggaacgcatcttcgatgatatgaataacggattcggctggaacaggcttccaaaatcctttatgggagaaaacacggtgtttcttctgcttatggcactcatacgcaacttctataaattcatcatggcgaggcttgacgtgaagaggttcggactcaaagcaacaagccgcatcaagacgtttgtctttaagttcatctctgtgccagccaaatgggtcaggacatcaaggaagtatgtgctgaatatctattcatgcaacaatgcttatgccaatgtgttccagaatgactttggataacaccgacaacttatagtcgtgattttgcgtattgcctcaagtcgcatggtggggtaaggggcatttatatgtctttatggtgacattcgatgcactgtgccccctttttactaacgatgcagattcttttcgcttctgtatcatattaggcgcgtagttgcggatttgaggataattatattgacgactgtcttatttctaatttgtcctttgataagtatattagttgcttattgggttctgttaagagaaaataaagaaaggtgtctttggctgttcgctgttttgatggcatgttatatttcttttattaatatatctaaatctatatcttctgaccctgatcttccatggtatacagaacagtatcttgaagccggaaatttgtcttatattcagtatattatggggtttggattaaatggaaaaggccgcgagttgttttttcctacttttaattatttggtctattttatagcaggagataatgttgcgctatatagatttatacattctttggtttgctatatattggtattctttgctataatccgttttaccacttatttaaaaatcgataatcgaaagatagtgattcccttgttatggtacacttgttttccgtggatttttacttactcacaaaccattttacgacaattccttgcttgttcctttttattatggatttgtgttgaatatttcttttatgataaaaagatgataataccatttgcttgtatggtattatctcatacttcaactattttatttttccctcttgtttacttgcctttttttcataaggaattaactcgtaaatctatcgtcttttacttgataggaattttactattcttgttgattcaaccaatagctgaatttttaggtatgtttgtagctgatagtgatactattttatcatatgctttaaagcgcgcatcaagtgatacgacttttgaattgcctcctttaggcttatctaaaatattatttttaatgttagaaataggagtgctactgtactattatattcagattaaagtaaaacaaattgatgctggtgtattaaagcgacatataggtttaataaatagtattatcattttgaatctatttattctaataaatattcatcaattagagcttagtaatcgtttgtttacttattctgctgttctttctgtttttccattatgctatttagtacagaaatataggttaaaggaaaatgtaattacgctcttttttgttattatgcaactgttgcttgtgttgtattttatgaactcaatttatatttacgaaataccttttggtatattaattaatccttttcatttattatttcaatgattctttctattattattccccataagaattcgtctgctttattagagcggttattaatgtctattccttcaaatgatgaatttgaagtgatagtcgtagatgataatagtaaaaaatgtgaaaaagaaaatttgtgtaaaatagtatctacatataaatttcatttgtatgaaatgaaaaataatgtaggtgctggtgcttgtagaaatttggctctaaaaaaagcaaaaggagaatgggtcctttttgctgattcggatgattattttatatccaatatgtacgaaataataagcgaagggcttaaatcaaaagctgatattgtgtactttagaactgatagtatttataatgatacgggcaaacaagcttatcgtcatgagaattataatcaactgatagatacttatctaatgaataaaaatgctgagaatctgaaatttaaatttttggttccttgggctaaattatttaaacgaagtttgatttcttcttgtggagctgtttttgaggaaattcctgcaggtaatgatatgaatttttctgttcttgtagctctttcagtacattcggtggaaattgttgataaggttttgtatatagttacagtttctcgtggctctattactacaacattcagtaaagaaaaatttgattcacgttttcaggcatctgttagatgtaatagattgttgcgagagcatggaatgggaaagtatcagcaatctatattgtattttattgtgaagggatacaaatttggttttaaatatttaatccatatgtgggtgataatattgaaaacaaaatctaatccttttattggttttagtaaattagttcattataagaaagttcttcaggacagagaaaatcctcgatatcttttaaaatcaaaatccagattgtaaatgaaagctaaaactaaagttcgcttcctaaatcttaatatactctctctcacccaaaaagagctgttagaacaaatggccgaaggtgtactttacacccccaacctcgaccacctaataaagcttcagcacgacagagaattttatgacatctaccagcaagcggaatggatagtatgcgatagccagatcctttatcttgcgtcaaaattattaaagcgatctttaccgatggctattccgggaagcagtttctttacggcattctataattatcatgccaataatcccaattgtaaaatttttctgttaggagcagccgaaggagttgctaaaaaagcgatggagaatataaacaggagagtagggaggcaaatagtggtcggcgctcattcaccctcttacggtttcgagaagaacgaacaggagtgtgaagaactgatacgaattgtcaatgaaagtggcgctactgtgttgttggttggagctggtgcacccaagcaagaaaagtggatagcaaaataccgtagccgtatgtccggtgtgaaattatttatggctcttggcgctaccatagacttcgaagcaggtaatataaaacgtgctcctagaatattccaaatcttggcgatggaatggttctatcgctttctgaaagaacccaagcgactgttcagacgctattttatagatgatattcagttcttttattattttgccaaacaattattggggctttacaaagatccttttgcatagtttccataaactatgtaaggaaacaacgggtaggagcagaatgaaagacatcagccagaccatcccattcaatattaataatactattgcttgcaaacgtttcatggaagcaaagatagatggaattctcataatactgggtagaaaaatgcgattaatttggttatgctttattgtaacgtctttgattacggaagcaggtgtagatattatggatattatgtatttattggaaagatgtaaagatatacttgaatattttaaagtcgcagaacaataaatgtaaaaataattttatcatattattaatttagtaagtttctctcagactgtcgaaaagttgaattaaataagttactatgctgcagcgattagaagttattgattttttacgaggattctctatttttaccattgtgctgatgcatttgttgcaaagttatccgatacctccgtttttaatggctgcttcatcttttggtggagcaggagtacatgtatttatcttgtgtagtggatttgggctttatttatcatacttaaataacgcttacttatagtcaatttttaaaacgacgttttttaaaagtttatttgccatacataataattatattggtaagtgctctgattcccttttataatacttcatcagataaacttctccaaatacttagtcatatatttctctttaaaatgttttttaatgatttggagaattcttttggagggcagatgtggtttgtttcaacaataattcaattttatttgatatggccttttttgttgaaattgtttaataaatcgatcggggtgatttatgctttgctaataagtatgttgtgggctactattgtagcgatgcttgggaaaagcgatgtacgtgtatggaatagtttctttttacaatatctttgggaatttgttttaggcatgtatttagctaaatgctataaacttaattctgaaatagtcaatttattgaactttaagatattagttcctgtttgtatactatgtgttgcttttacaggagtggccgggttaaaaggaggtatttggaaactatataatgatataccttctatgattggatatttgttcacattgttgattatatataaattacatataaagcttattaatgggttatttgtactgactaataagatttcttatgaatggtacttagtacatatgttggtatttagttgtactttttattatttgtataagttggaaactttcggtatggtagcaatagctgttatttcatttattttttcgtatgttgtagcctgtttatatcattggattcttagtaagatgaagatattttgaaataaaaagaattggttatagatgaatgcctaatgaaagacaccagccaaaccatcccattcaatactaataacactattgcttgcaaacgtttcatggaagcaaagatagattgaattctcataataatgggtagaaaaatacgattaattttaatatgccttattgcgattagctcgttacagagtcaggcacaggcactatacggcacaacaggacttcttcatgcccccactgccgagatgcaaaaagacaagacatttatggtgggagggaatgtgttgcatcttgttccgttgcagtatcttaccaccaatgagataaaatacacattcaattattatctgaacataaccatctttccctggctcgaagtgggatacacctgcaccatcaattatgcaaatcatggctccacttattttccggagcagtcttggggaaagtacaccaatcaggatcgcgctttcaatgctcgtctgcggttgtggaaagaaggctggtggaagccctggactccgcagatagtccttggtttggacgatcccacctcgcatgaagcatacggtggtggggccattaagttcgatgaggacggtatgcagaacaatcattttacacgatattatctggcggcaaccaagcatttcagtttcgctggggtagggacactgggcgttcatgccgcatacgtggattatcgtgcctgctggtttcctcattacagaaggcctgccgcgggtgtgaatttcaaattcaatctattgtcggaagataacctggcgctgaaagctttgaacgggctggatctgatggccgaatatgacgcccgcacagtgaacatcggggcacactaccagctttggaaagaccacatcaatctgattgccgaattgaatgatggaaaatacttctccggaggcatttatttcaaaatccatttaaaataataaaaagtactcattaataggaattcccgtcagatttatcgttagcgtccaaaaatgacgtataggatgaccgatataaaagttagatctttgctttcgttaaatcaaaagccaagtttatgtatagttacaatgattttgagcgtctatttttgcgctataaattggaaggtatccctgcgggtgtttctattgagaaattttgtatgtccagccaagttccttataacctattttccaaatggtacaaggatatccggaggaagatagttcctgttcaggttttgggtgctccctccacggaatcagaaatgccggaaagtccttcgctaatcccagaacaaaagccagaatcggctcctcggctttcttcgcctgccgaacttcgaatcctggtggatatccgcatgagcaatggtgttcatattagtcagaaaaatttaagctacgaaggtttgaaaagcttggtggagaaactggaggtcttatgttgaatattacaggactaaaccgttttttctttgttcgtgattttcatgatatgcgctgtaaatatgataaggtcttatccatcatccatcagcagttgaaccgtgagccggaagatggtgatgtctttatcgtgatgtctaaaggtttacgtctggttcgtttgttcagctatgaccgacggtcttacagtatgtttgagagacgttttagacccggataccagtttatgcaggtaacctataatggtgctgaaagtattttgccgtactatgagtgccgacaatagagtttgtgccgaacgttttattcgtccattggttggtgagcgtaagcactcgttattcttcggaagtgacaagatggccagcgtctcagcggtatatcataccatcatctccatttgcaggatgcagggtgtgtctgtgcttgattatttcaagagatttttcagtgaaattgttaaaggacgtagggattatgaatatttgttacccttgacaatcggactggagtaataacaaatattaaaaatcagtaccttttttgacgttatttattggagaactgccttgtggcggctttccttggggtacacgtcaaaattggactataacataaaaaaactaaaatataattgcttcattattggataagcggaatataatttgtttctttgtcatacaatatattaagctaataccattatgcaaaaaaatgagattatccattccattcgtgaaacggctcgtcaggtgatgccttcagggagtcgtgtcattttattcggttctcaggctcgtggggatgcacatcatgagtccgattgggatattcttattttattggataaatctcgcatatataatgaagattttgaccgtatagcttatccactggttgaattaggttggaaaatcggtgcggatatcaatccattgatatatacttatacagattggcaaagacggagtttcactcttttttataagaatgtagaacaggagggaattgaattatgccactaagtatagaagaaaagaaatctattattgcttaccgtgttcaaaaggctgatagcgtttttattgaagcttcggacaatgctaccatgaatcattggaatttggttgcaaatcgtttgtattatgctgtcttccacatggcttccgcattattgatagataaaggttttacatctaagacccatagcggtgtaatttgtttgttggggcaggaatttgcaactaaagggttgttggacaaagatgagatgcgtttggtttctcgtttacagaatatgcgtcatgccggtgattatgatgacatgttcgattgggctgaagaagatgtaaaacctctttttaaccgaactgaacttttaatcaaaaagatgaaaagtttattatcgttggtggaatagtatgtttcattttgttaatcttacccttctccataatatcggattggcatgggccaatcgttgagaaatcgcttaaattattagctcaaatgttttttaggcacttttcagtggctaaaatcaaatatttacaattcaatcttacgatacatcctaacccccagtgaatacaggagataaggactattgccataggggtcggatacttataatatgacggttaccgttcgttacctttattcttttccgtttgaaagaaaggaagcacggaagagcgtctggagatagctcgcaagctgaaagacaacggcttgtccgtggaatttatcgttcagactacccagctttcagctgaagaggtggaagggttgtaacatttcattctgctttggacaaaggggctttaaatgataaaaaagataatccggttaagatttctgaaatagattttgttcctttgcataaacggtaaaagcgaaagataatggaaaagcagcagttgaagagatgcctgatagggatacagactttttgccgggaagaaagaccttttcaaaggacttgttatcgaaaagctggaaaccgagtggacggaatatccggtgctacactttgatatgagcctggccaaacatctggacaaggagaaactgaatgagtatctggtctggcagttgcgggaatataatgggaaatatggcctgacgaaaaacaatgatgcggaggttaacgtccagttggcagacctgataaagcgtgcctatgagcagacgggccggcaggtggtagttctcattgacgagtatgacgcgctcttgctggatgtgttgcatgaggaagagaatctccccgtacttcgtaatgtgatgcataattttttacagtccgctgaagggatgcgacccttatctgcgctttgttttcttgaccggtgtcaccaagttcgcgcagctcagcatgtccggcactttgaacaatatctcgaatgtcagtatgttgaaaccatacgctgccatttgtggtatcactcaggaagaaatgctggagcagatgcatgaatatatagaacggcttgccgttgcgcaggaaatgactgaagaggaaacgctgcggaagctgaaagagaaatatgacggctatcatttcacttggccttcgcctgatatttataacccgttcagcctactgaatgccttagaaagaagaaggatagacaattactggtttggcagcggtatgcccacctatctgatagagatgctgcgcaagttcaaggtgtctccgtctgctatcggaatgaagaaggcgctttcaaccagttttgatgcccctaccgagcgtatgacaactatcgtgcctctgctttatcagagcggttatattacaattaaaaactatgataagttgactcaactatatacactggatatcccgaacggtgaaattagggtggggttgatgtaaagccttttgcctaactattcctttccaccgtcccgtattgtgataatacgaattatgaggggcattatcagcaactattctacatcatcttttctttgttcgggatgtatgtggatgtggaagtccgtaccccgaaagggcgtgtggacgtggtgatgcgtactatccacactttgtatgtcattgaattgaagctggacaaaagtgctgattccgctttagcccaaataaatctgaagaactatcccgaacgctttgttctttgcggacttcccgtagtgaaggtggggataaactttgactcggaaagtcacactttgagtgattggattatagagggatagacaataataggtcctgtctgaattcggtggaggaacagttcataaccgccgataaaataaatttataaagatagaatatttactataggctgtatgcgataacgtatgcggccttccttgtttttgttgtcggtagtgactggcatccgtataatgtattgcaagaacgattgtcttcgtgactaccagcaggagatgaagctcaggctctttgaagagtgggagcttcaccggagtgtgatggtacagatgcctacaggcacgggaaagacacacctgctggctgccatagtgagggagttcttgtgtggttccgatacccgggtatggattgtggcgcatcgtcgggaactggtggagcagatagaggagacggtttcccgttatggaatggggagggaggacggaagtgtgagggtgatgtccatccagtggttgtcacgaaaccggaagattgtgaacggacagccggatttgattgttattgacgaggcacatcatgccctggcagaaacttatcgggagctttggaagagttatccggaggcgaggaaattgggtatgaccgctaccccctgccggctgaaccgcaaaggattcacggatttgtttgataccctgattacctcatggagtattgcggaattcatcggaaagggctggttgtcgtcatttgactatgtgtccatccgtgcgaacagcagcgaacagcgactgattgactcgttgaagaaacggggtgcggacggggattatcaggtaaaggaaatgaatgcggtgttaaatcgggaaaccggcattagacaattgtacgagagtgtccgaagatatgctgccgggaagaaaggaattgtctatgccgtaagtattgcacacgcccgacagattgcagcctattacagcttacatggtgtggagtctgttgctatcgatagcaagactcccgctttggaacgtggaagactggtagagaatttcaggcagggaaagatcagcgtgttggtcaatgtggatattttttctgaagggtttgattgtcccgatgtggagttcgtgcaactggctcgtcccacgctttcgttagcgaaatatttgcaacaggtgggacgggggctgcggaagtcagatgataaggaatcatgtatgctgatagataatgtagggttgcatcggattttcggtctgcctgtctgtgatcgtgactgggaggcgatgttcgaaggacggatggcgggaaatgctcagctccggacacggatggagaacaacgggctgtctgtgtcttgctcgctatcggaagatagcaaacggaatgaaggactggaaattgtgatgacacacaactgtctgctggatgctattcggaacgggaatttgatttgtttgggaggaggtggtccggtcggtgaggaacaatggactgttttgaaagcctgtcatgatcggcagagtggtttgtggggcttgagatgtgggaacaaaatcacagtgattcctcaataccgggaagtatttgatatttgtgcaaaccgggctgctgtccgttttaaagatggccggacaggagtggtggataagtccggagttcccatggtggtgacaggctgttgccggagattgagattcctgaagggagaacttctttctgtcaccaaagaggacgggagtgactgttacaccgatttgaagacaaacagaacttatcaggagaggccggtggttttttcatacggcggcatagagttgctgcgggtgggggagactttccatagccgcacgcggaaggcgtatacctctatgcatggtttgcacaaagacagtctttgtttttatggtttctacttgaagataccggattaccgtgttccgaagtcttgccggctagttgatcctgtgtggtctactatatttgatgtcttcgcctgcgtgctggaaggggatgatgaagaggtgtactggtgttgtggctgtttggcggatcggagcattgtggtgatggacggggaaggaagctattatcatgtggagaaaggaaaggggaagcggtatatagcttgtaatgctcctaaggcgggcgaagcggattttgcctccgtggtggaaggtctgaggaaggaagccgggcggcgtgcggagagcgtacagcgggaacggcaacagaatgaggaagagaaaaggcggaagaggctggaggaaataaaagatgtccttcctttccggatggggatgaagtgggggctgaaatggggagatcgtatcgtagtgcctccttgttaccggaatatctgtattcctgtaggcggttattgtgcttttgaagggaatgcctgccagtggggggtgatggcgctggatggaaaagtggtggtggaggccagatatcagaaggtggagatagaaaaggatggaacggtgcatctgaccatcattccgggtaaggtaaagaccatcaaactttgacggatattgaattgtttgggtatggagtgggtaaatttcagtatatcacgggtatttgatgaggagagcaattagtgtaaaatagtttttacgccttgatgttataatctttacataaaagaaaacaattctaccgttgaagctcttacgtgggataccgctttcaagaacataaacgaaccaagcggatgggccatgaaagggatacatgaagaagcctaccaataaatccggcatcaattgacataacaaaatcggataactgaaaaattatccgcttttagtttctttatttcgaaagaaagatatatatttgcaacgctttttcagaaaagcacccgatattgcagaaaaaacagttgccgaaatggctcagttggtagagcaattcattcgtaatgaataggtcccgggttcgagtcccggtttcggctcaagaagcggtattctaccgcttctttttattttatatagttctctttttccatataataaagcccttctccacggtcaccattctctaaatcagttaactctactttaaatattcggtaggggagaatatttttctggtgtctgggcatatccacggtcagcagataggcattgccgtattcggtagcatcgaagtactcttttatctcttgtttcatcagaacaggtacttcttctccatctatccaaacgatagcttttagtttgtcagccgatggtgccagcaaaacgcctttggcttgtttgcttaaacctgtttgctcaatcttgctaagatcctgtgcatgtacaagtgaggatttttcttctttttgccattgcagggtacgggtcagactcatggggcgaacatatatctgataggtgggcatgcctccagggatgtggaaaatacgtagtccatagacttccatacgatgatagcgaatgttgagagtggtatcacgatcggcaatgaaattccatgcccaaaattcgagacgttggtctttttccgctagtccgggttttacggtatgtgggtaggtagacatattgatagctcccatactttgatactttcctttaggaatacgggtggtgtagtatccgtttttgtcagtgatggcttgtttaatgtcatcaaaagaggggctttgccaaaagatggaacaactgtcaatgggttgtccgttataatctgttacttgtccgcatatggttactgaatcccgttgttgtgcatgtccagcagaataaagaaaaaataggataaaaaagagaatcaatttaggaataaaaggtgttttcattattttatctgttaattgtgtttttaatgtgtatctttttcacttctcaccacttcccatcctttgaactgtatcaggactttatgtaacgtggttccttgagccagatacagcacttttcttcaaaattatcataataataagaagcgtaatcctttatgaacaggtagaggacaacattgcaataagtctcaaaacatttttccagtctttccaatgaaacccctgcctttgagaaatcaaaataaatcacctggaaacggttgcgctggtcggtggaattcttaccaatccatagtccgttgaataactttcgaaacggtctttttgcaaaatgtcatagtaggctttcattatgcttaggaaaaggctttttccgaaacggcgcggacgtatcataaagatatagctggctgtatcttcaatcaggggcaaatacatggtcttgtccacataataataattttcagtccgcatccgcacaaagtccgagatgccgtaagggatttgaggcgctttctttgtttccatctttcttcttctcttttttatagctatacaaagttacaccatttttttctgatacccagcatggaaagggctgttttttccactctatttcgaaaacgttgacaaaagcaccgcgcagccttcctcttttcggaggcaaggctgcgcaaaagttcggggtgcaaagcatctcttcatttaatgaatgctgtaagagaagcgttaaagatatgcatgaatttgtcggaatcgaattcacgttgccatattatgaatcgtatgcttcttcgtgcactcccttcacggcccgtccgcttggttcgttcatgttcttgaaggcggcgtcccatgcaagggcctcggcggtagaacatgccacactgggcacgcttggcacgctgcgggctgcgctttcactgggaaagtgctcctggaagatgctgcgatagtaatattcttccttgttttgcggtgtattgataggaaaccgttcggctgcgtgcgccatttgctcgtcactgatggcttcggcggtaagggctttcagtgtatcaatccaactatagcccacgccgtcgctgaactgctctttctgtcgccatgctacactgtcgggcaacatgtctgcaaaggctttgcgaacgactttcttttcaatggtgtttccggggcacatctttgcttcgggattgaggcgcatggctatgtccagaaattctttgtccaggaaaggcactcggccttccactccccacgctgcgagggatttattggcacggaggcagtcatagaggtggagcttgcctagtttacgcacggtctcttcatgaaaggcttgggctgtaggagctttgtggaaatagagatagccgccgaacacttcatcagccccttcgccactcagcaccattttgattcccatgcttttaatgacgcgtgccagcaaatacatcggggtagaggcgcgaacggtggtgacatcgtaagtctcgatgtagtaaatgacgtcgcggatagcgtccaatccttcttggatggtatagtggatttcatgatgcacggttccgataaagcgggccacttcgcgggcttttatcaggtcgggcgcaccttccagaccgatggcaaaggaatggagctgaggccaccaggcatcttttttattgtcggtttctacccgtttgcctgcatatttcttggcaatggcagagatgacggaactgtccagacctccggaaagaagtacgccgtagggcacatcactcatcagttggcgtttaacggcctcttccagcccgttgtgtatgtcctgggaataggcattgttgtttttcacggcttcgtattcaaaccagtcgcggacgtaccaacgggtcatcttgctttcttttccccaatagtaatggccgggaaggaagggctcgtattcatcacagaacccttcgagggctttcaactcgctggcgcagtatattttgccgtccttatccttacctatatataaaggtatgactccgatggggtcgcgggcgataagaaaatcatctttctcctcatcatagagggcgaaggcgaagatgccgttcaggtcttcgaggaagtgaatacctttgtcacggtaaagggcaaggatgacttcgcagtcgcttccagtttggaaatcatactttccggcgtactttgtacggatatcccgatggttgtagatttctccgttcacggcaaggatttgtttccggtcggggctgtataggggctgccctccactttgagggtctacgatggagaggcgttcatgggccaggatggcagagctgcctacatagatgccgttccagtccggcccgcggtggcggagcttttgtgacattttcaatgctttctgacgcagttcttgcgtttgttgctttatcttgaatattcctacgattccacacataattgtatttgttgatttatttattgagataactgtctatgtccgttgccgctttccgtccgctggcaatggcgcgtactaccaggctggctccgcttgccgcatcgccggctacgaatacgttttcggcaaattggggatgttcgggctttaggaatcccattgccagaagaaccaggtcggtttcaatcacttctatctttcctgtggatttcatggtagggcggtcgccatcaggattgggaatccattccacctgttccacttccacaccgcagactttaccgtttttgccgagaaacttatgagtggcgagagaccaccggcggctgcatccttcttcgtgggaagaggtggttttcagcacaagggggaattggggccatggagtggctggattttgtcctacgggcggttggggcatgatttcgatttgggtgacgcttgcagcaccctgacggttactggttccgatgcagtcgctgccggtgtcacctccgccgatgattagtactttcttacctttggcggtaaccaattgttctttcgggaacgtcatgccggcaaggatacggttttgttgcgccagcatatccagtgctaggtggataccttttagttcacgtccgggaacagtaaggtcacgcgcggtcggagttccggtacaaatgcagtaggcatcaaaaccttcggggagttgccgtacatccatgtcgctgttcattttgaagagaatcccttcttcttccatcacccggatacggcggtcgatgatgggcttgtgcagtttaaagttggggataccgtaacgcaacaagccgccgggagcctcatttttgtcgaagacggttactgtgtatccttttccgttgagttggttggcagtagccagtcctgcaggcccggcgccgataatggctactttccgtccgttgcgttcaatgtgccgggggctgatataaccttcgcggaaggctgcttcggcaatggccgcttcattctcgcggatggtgacgggggagtccatgctcagtttcagcacacagctcttctcgcagagggcgggacagatacggcctgtgaattcaggaaaatcgttggtttcgttcaatatcttgtaggcttcttcccatttgcctttgtagagggcgtcctgaaattcgggttgcttgttgcccaacggacaagcccagtggcagaaaggaacaccgcagtccatgcagcgtgaagcttgaagtttccggtcacggctgttcagggtctgttccacctcactatagtctgatatccggtcgtgaatgggacggtagcccgcttcttggcgcggaatggttaaaaatgcttttggatttcccatatttttgttgtatttctttgttgataatttgtgtgatgtattaataatctctttgtacatcagctattttttgttgcagcttgcgcatttgttcttcttgcaatactcgtttgtattcgatggggactacctggataaattcatctacatagcggttccagttgtccaacatcgttcgtgccagtttggagccggtatagaggtaatgctggcggatcagttcatgcagttccttccggtaagatgcctcctcgataagcgagagctccaccatttccatgttgcagaaataatcgaagttgtggtttttgtcccatacataagccacaccgccactcatcccggcagcgaaattccgtccggtttctcccagtaccacaactcgtcctccagtcatatattcgcaacagtggtcgcctacaccttctaccacggctgtcactccggaattgcggactgcgaagcgttcacccactcgtccgttgatatacacctcaccatcggtagcgccatacagcagggtatttccggcgatggtattcttttccgcatcgaaattgctacgcacgggaggcagtactgcaatgcgtccgccactcagccctttgcctaggtagtcatttgcttcgccttccagcttgaaactgatgccgtgggtcaggaacgcaccgaaactttggcctgccgaacccttgaatttaatgtggatggtctgttcgggaagtcctgcctgcccgtatttcttagcaaccgcccctgccagcatggcgcctaccgagcggtccgtattggcgatggtgtattccagggaaatctcttttccgttttctatggcatcccgggcggcggccagtatggttacatcctttacatgggcgatgtcgtgcttctgttccatgacatggtgtatggcagccccgttgtccacccggtgcaacagtctgttgaaatccagcagtgaggatttcttctcacttggcgcttgttgtatttcaatcaaatccgtacgtccgatgatatcctccaatcgggtgaatcccatttcggccagatattcgcgcacttcctgtgccaggaaggtgaaataattcactacatatttataatgcccacggaaacgtttgcgcagttcagggtcttgggtggccacgcctacgggacaggtgttggtgtggcatttgcgcatcatgacgcatcctagtacaatcaatgcggtggtaccgaaaccgaattcttctgcacctagcaaagccatattgataatgtcccgtccggttttcaactgtccgtccacttgcagtttaacttgtccgcggagtccgttcagtaccaacgtctgttgcgtttcactcagccctatttcgggcgagatacctgcataccgcatacttgaggcaggtgacgctccggttcctccttcagctcccgagatgacaatcagatcggctttcgctttggccacgccggcggcgatggttcccaccccgctttcggctaccagtttcacactgattcgtgcctgtgggtttacgtttttcaggtcgaatatcaactgggccaaatcttcgatggaataaatatcatggtggggcggaggggaaatgagtgagatgcccggaatggagtggcgggttttggcaattacctcatctaccttgaatcccggtagttgtcctccctctcccggcttggcgccttgggctacctttatttggatctcttcggcatgaactaggtattcggtggtgactccgaaacgtcccgacgctatttgcttggtcttgctgcatagtgagataccttcgtaagtgcctgtaatgcgttcgctgtcctcaccaccttcacctgtattgctgcgtgcactcagtttgttcatggccagtgccagcgcctcatgtgcttccttgctgatagcaccgaaggacatggctcctgtcacgaaatgtttcacgatgttttctatcggctccaccttttcaatatcaatagggtttcgtttgtgcccgaagaagttgcgcaggaagaggggggaatctttttcatctaccatagaggtgaattccttaaactttttgtagctgcccagtcgggtggccagttgcagggtggagatggtttccggattccaagcatgccgttctccgtctttgcggaaggagaacagtccgttatgcggtaaaatgtcgctcacttctttcggagagaatccggcatcgtgcagggcgatggcatctttggcgacttcttccagacgaatacctccgatgctggatgtctgtgtgccgaaatagcttctcaataattcctcactgacccctacggcttcaaaaatcttcgcgccccgataggaacggatcgtagagatacccatcttgctcatgattttaaacaagcccttgcagatggctttgatataattcttttcggccgtttcgtaattcatctgcacatcgccttttctcactagttcatccagtacggcaaaggccatgtacggattgatggcactggcaccatatcccagtaacagggcggcgtgcatcacttcgcgaatctcgccgctttctacaatcaatgcggtttgtacgcgtttctgaaccgagatgaggtgatgatgaacagcgcttaccgccagcagtgacgggatggcggcatgagccgcatcaacagaacggtcgcttagaatgatatagtttactccgtcggtcacggattgctcggcctgtttgcacaaattactcagcgcttcctgtagtccggcttttcctttgctcacctcgaataggatggggagtttcacggtattgaatcctttatatcggatattgcagagaatgtccagttgggtgttatttagtacgggatggggcagacgtaccattttgcaatggctttcgctgggtactaaaatgttcattcctacggcgccgatgtattcggtgagcgacatgactaattcttcacggatagggtcgatagccggattggtaacctgtgcgaattgttggcggaagtagttgaacagtaactgcggtttgtccgagagaactgccagcggcgtgtcgttacccatagaggcgacaggttcggcccctgtgttacacattggtatgagggtacgttctatatcttcacgcgagaagccgaaggtgcgtaacatacggtcataaccggctatccggttgtctatcttgcgcccgcttttcaaggtatcgagttcgatgcggttggtagacagccaggtgcgataaggacgggctgatgccaattgttctttcagttctccgtcataatatattttaccctgttcagtgtcaatcatcagtatttttcccggttgcagacgtcctttttctttaatctctcccggttcgaaatccatcacgcctacttcgctggccactaccatcatgtcattgttggtgatgaggtaacgggcagggcggaggccgttgcggtccaacattcctccggcaaagcgtccgtcactgaacagcaacgcggcaggtccgtcccaaggttccattaggatggagtgatattcgtaaaatgctttcaactcttcactgataggatttttatcattgaatgattcgggaaccagcatcgccatggcatggggcagactcaatcccgacatcacaaaaaattcaagcacattgtccagtgaggcactgtcgctcatacctggctgaataatggggcggatggctttgatattccccaatgccggagaggagaggacactttcgcgtgcttccatccatcctcggttgccgcggatggtattgatttcaccattatgcgccaacagacggaaaggctgtgccagactccatgtaggaaatgtgttggtgctgaagcgggagtgtaccaatgccagtccactggtaaagtaaggttgtgttaagtccgggaagtactcgcgtacctgcatggacgaaagcatccctttatatataatgtttttgcccgatagtgaaacgatatagaaatctttatgccggacacgtttttcaatctttttacggataacataaagggtacgttccaagttttccacatcagtcactccggtgatgaacacctgtttgatatccggttcggtggctcgtgcgtctttgcccaagcaatcgggattagtgggcacattgcgcagatgcatcagtgtcagtccttcccgttctatttcttcaatcataatacttaggataccggcttgttctttttcatcttttggcagaaatattagtccggttccgtattttcccttctcgggtacggggataccttgcaagaggatgaattcgtgggggatttgtagcataattcccgcgccgtcgccggtcttgttgtcagctccttccgcacctcgatggcgcatgttctccagtacctttaatgcggagtctaccagttcatgtgatttattgccatgaatgttgactaccatacctacaccacaagcatcatgttcgttggttgcattataaagaccattttgttctctttttaccattatgactgtctttagtttgtaataatgttgatttgtatttcagtttgttttgcaaaggtagataatttatttctttttgctataaaataaatgagctgtgttagtaaaaagatgctcttctgcttttgatgcttacatattgtttattctgcctgtctattacttttaaatcgtaacatgatttggcgaaattgctttgataatgtaagttttcatatttattttaaaaacggataaaacatttcttttcgatttctattcttacttttttatcgctttcgtcaattatttatggtcttttattgcatttatgttaattgatatttgtatctttgcagtcaaatcagaacatatacttatataaattatgtgtggaatagtaggctacattggaaaacgagatgcttaccctgtcctcataaaaggcctgaagcggttggaataccggggctatgatagcgcaggagtcgcattgattgataaaaaaaggaggttgaacgtctataagacgaaaggaaaggtctcagacctagaagcttttgtttcccaaaaagacgtttccggtacaattggtattgcccacacccgatgggctactcacggagagccttgccaggctaacgcccatcctcatttttcttcttccgagaatcttgctcttatccacaatggtattattgaaaactacgctaccctgaaagaaaaactacaaaaaaaagggttcatctttaaaagtagtacagataccgaagttcttgtccagctaattgaatttttccagctttccaaccatttagatttacttactgccgttcagttggctctgcatgaggtgattggtgcatacgccatagcggtgtttgacaagaataatcccgatgagattattacagcccgtaaaagcagtccgctggtggtagggatagggaaggatgaattttttttggcctcggatgctactccgattgtagagtatacggataaagtggtgtatctgcaagatggggagatagcggtgattcgcagagacaaggcgctggaagtcgtcaatttggataacgtgcttcaaaatcccgaagtacgtacggtggaaatgaatctgggacagctggagaaaggaggatacccgcatttcatgttgaaggagatattcgaacaacccgattgtattaacgactgtatgcgtggacgcatcaatgcggacggtgataaagtagtactgtcggcggttattgatcataaggaacgtctgctcaaggctcgtcgctttgtaattgtggcttgcggaacttcgtggcatgccggattgatagggaaacaactgatagaaagtttctgccgtattccggtagaagtggaatatgcctccgagttccgctatcgtgatccggtgattcatgaagatgatgtggtaatagctatctcgcaatcgggcgagacggccgatacattggctgccatagaactggcgaaagagaaaggagcttttatttatggtatatgcaatgcggtaggttcatccattccgcgcattacagataccggttcttatattcatgtaggaccggaaataggagtggcgtctactaaggcatttaccggacaggtaactgtgctgaccatgctggcgctgaccctggcaaaagagaaagggagcatgacggatgagaaatacctggaagtgattcgggaattgactgtgattccggctaaaataaagaagattctgatcagtaatcccaagatagcggaactgtcgcgtatcttcacctatgcacataatttcctctatttgggacgaggttacagttttccggtagctttggaaggtgcgttaaagttgaaggagatatcttatattcacgctgaaggttatcctgcagctgagatgaaacatggacctatcgcattgattgatgccgaaatgcctgttgttgtggtagctacgcataatgcgatgtatgaaaagataatgagtaacatacaggaaattaaagcgcggaagggaaaagtaatcgctttggtcacagaaggagatacggtaatcagcaagttggctgatgattgcattgagttgcccgaaacattagagtgcctcgaaccgttgatagctacgatccccttacagttattggcctaccatgtagccatttgcaaagggaaaaatgtggatcagccacgaaatctggcgaagtcggtaacagtagaatagaaggcaatgctgccggagattatgcaggaagttcccggaagtttccggcataattcttgaaagatgtgccgtaagtttggaaaaacgacagaaggtcttgtcatacctttgggatgtttttataagaatctgaaaatgatatattaatttaaggagtaaagagagagcatggaaccgttaaagcatgaatgtggggtcgctatgatacgactgctgaaaccgctggaatattatcaggaaaagtatggaacctggatgtatggcttgaacaagctgtatctgctgatggaaaaacaacataaccgcggacaggaaggcgccgggctggcctgtgtcaaactggaggccaatcccggtgaagaatatatgttccgtgaaagagctttaggttcaggggcgataacagagatattcggtacggtgcaaaatcatttcaaggatttggcacccgaacaattgcatgatgccggatacgccaagaaatgccttccctttgccggagaggtgtacatgggtcatttgcgctattctactaccggaaaaagcggtatctcctacgtgcatccgttcttgcgtcgtaacaattggcgtgccaagaatctggcactgtgcggcaatttcaacatgaccaatgtggatgagattttcgcacgtatcactgctgacggccagcatccgcgtaaatatgccgacacatatattatgttggaacaagtgggacaccgtttggatcgtgaggtggagcgcctctatgtggaatgtgagaaggaaggtctgaagggtatgaatatcactcacgccatagaagaccgcattgacttgggcaatgtccttaagacttcgagcaaggagtgggatggaggctatgtgatctgcggtatgaccggtagcggtgaatcttttgcggtacgcgatccgtggggcatccgtccggctttctggtacatggacgatgaaatcatggtattggcgtccgaacgtcccgtcattcagactgccttgaatgtacctgccggaagcatcaatgaattgcaaccgggacaggctatccttatgagcaagaccggaaagatgcgtttgacacagatcaaccgggcgaaagaaaagaaagcttgttctttcgagcgtatctatttcagccggggaagcgacatggatatttataaagaaagaaaactgctgggcgaaaaactggtgaatcctatcctgaaggcgatagattacgatgtggagcataccgtattctcttttatacccaatacagcggaagtggctttctatggtatgttagagggatttgacaattatctgaatgaattgaaagtaaagaaaatagaagctttaggacataaccccaaccacgaggaactggaaaaaatcctgtcctggcgtatccgtagcgagaaagtggccatcaaggatatcaagctgcgtacctttatcgccgaaggcaacagccggaatgacctggccgcccatgtgtacgatattacttacggtagtttgatacctcatgtcgataatctggttattattgatgacagcatcgtccggggaactacattgaaacaaagcattatcggcatcctcgaccgcctgcatcccaagaagattgtgattgtatcttcttctccacaggtgcgttatccagactattatggtattgatatggccagcatggatcagtttatcgctttcaaggctactatcgatttattgaaagaacgagatatgaaagatgtaatagcccgtgcttacaacaaatcgaaagaccaggtggggttacccaaagagcagatggtgaattatgtgaaagagatttacgctcctttcactaatgaggagattgcggcaaaaatggtggaacttctcactccgaaaggtacgcaagctaaagtggagattgtttatcagacattggaaggattgcatgaagcatgtcccaaccatacgggcgactggtatttcagtggggattatcctactccgggtggagtgaagctggtgaaccaggcgtttatagattatatagaaaaagtatatcaattctaaagaataacattcaagatagattagatgagaaatgtaacattgatcctcgacgacgggagccgtttcccgggcaagtcgttcggttatgagaaaccggtagccggtgaagtggtgtttaataccgctatgaccggttatcctgagagcttgacagacccttcatacgcggggcagttgatgaccttgacttacccgttggtcggtaattacggggtgcctccctttactatcgaacccaacggcttggccacttttatggagagtgaacgtatccatgccgaagcgattattgtaagtgattacagtgaagaattcagtcactggaatgcgaaagaaagtctggccgactggctgaagcgtgagcaagtgccgggcattacaggtatcgatacccgtgaactgacaaaagtccttcgcgaacatggggtgatgatggggaagatcgtatttgatgatgagcccgataaagtgcccgaagcaacgtatgcgggtatcaactatgtggataaagtatcatgcaaggaagtgattcgttacaacgaaggcgctggcaagaagaaagtggtgttggtggattgtggtgtaaagacaaatatcatccgttgcctgttgaaacgggatgtggaagtgatccgcgttccttggaaccatgattttacagggatggagtatgacggattgtttatctcgaacggcccgggtgatccggatacatgtgatgaggcggtacagcatatccgcaaggcgatgagcctgagcgacaagcctatctttggcatttgtatggggaatcagttgctttcaaaagcaggaggtgccatcatctataaattgaaatacggtcatcgcagtcataaccagccggtgcgcatggtgggaacggaacgttgtttcattaccagccagaaccacggttatgcagtagataataatacattggggaccgactgggaaccgctgttcatcaatatgaacgacggttccaacgagggcatcaagcataaaaccaaaccttggttctcggcacagttccatccggaagcggcgtcgggacctacggataccgagttcctgtttgatgaatttgtgaagttgttataaaccgtgtattaaaaagaacaagtatgaaagacgaaataaagaaagtattattattaggttccggcgccttgaagattggcgaggccggagagtttgactattcaggctcgcaagcgctgaaagccttgaaggaagaagggattgaaacggttctgatcaacccaaatattgctactgtgcagaccagcgaaggggtggcggaccagatttatttcctgcccgttactccttattttgtagagaaggtgatagaaaaggaacgtccggatggtgtgctcctgtctttcggcggacaaactgccttgaactgtggggtggcactgtacaaagcaggtattttcgaaaaatacaatgtccgtgtgttgggtactcccgtgcaggccatcatggatacggaggaccgtgagttgtttgtagaaaaactgaatgaaatcaatgtaaagaccatcaagagtgaagcggtggaaaacttggaagatgcccgtcgcgctgctaaagaattaggttatccggttattatccgtgccgcctacgcattgggtggactaggctctggtttctgtgacaatgaagaggaactgaatgttctggctgaaaaggccttctctttctcgccgcaggtattggtggaaaagagtttgaaaggctggaaggaggtggaatatgaagtggtccgcgaccgttatgataactgcatcactgtatgtaacatggagaactttgacccgctgggtatccataccggcgagtctatcgtgatcgccccttcgcagacactgaccaatgcggagtatcataaacttcgtgaactggctatccgtatcatccgccatatcggcattgtgggcgaatgcaatgtacagtatgccttcgatcccgaatcggaagattaccgtgtcattgaggtcaacgcccgtctttcgcgctcatccgcattggcttccaaagcgaccggatatccgttggctttcgttgccgccaaattaggcttgggatacgggttgttcgacctgaaaaactcggtgacaaagaccactagcgcattcttcgaacctgcactggactatgtggtgtgcaagattccccgttgggacttgggcaagttccatggtgtggatcgtgagttgggctcgtccatgaaatcggtgggtgaggtaatggctatcggacgtactttcgaggaagccattcagaaaggtttgcgcatgattggccagggaatgcatggcttcgtagagaataaggaactggttatagaggatgtggacaaagcccttcgtgagccgacggataaacgtatcttcgtgatcagcaaagccatgcgtgcaggttacacggtagaccagattcatgagctgaccaagattgacaaatggttcttgcagaaattgcagcacatcatgaacacttctaaagagatgcacgagtggggcaataaccacaagcagattaccgatatgccggacgagttactccgaaaggcgaaagtgcagggattctccgatttccagatagcccgtgccattggctacgagggtgatatggaagacggtatcctgtatgtgcgtaatcatcgcaagcaggtgggaattcttccggtggtgaaacaaatcgataccttggcagccgagtatcctgcacagaccaactatctgtacttgacttatagcggcgtggccaatgatgtgaaatacttgggcgaccataaatccattgtggtactgggttcgggcgcttaccgcatcggttcgtcggtggaatttgactggtgtggggtacaggccttacagaccatccgtaaggagggttaccgcagtgtcatgatcaactataaccccgaaacggtttctaccgactatgatatgtgcgatcgtctgtactttgacgaacttacttttgagcgtgtgatggatatcctcgaactggagaaccctcacggagtcattgtatctaccggcggtcagattcccaataacctggctctccgtctggatgcgcaaaatgtaaatatcctcggtaccagtgccaagagtattgataatgctgaggaccgtgataaattctcggccatgctggaccgcattggggtggatcagcctgaatggagcgcattgacttctatggaggatatccatgcttttattgataaagtaggcttccctgttttggtacgtccctcgtatgtgctgagtggtgcggccatgaacgtctgctccaatcaagaggaattggaacgcttcctgaaactggctgcaaacgtatcgaaaaagcatccggtagtggtgagccagttcattgagcacgctaaggaagtggaaatggacgctgtggcacagaatggcgaaatcgtggcatacgctatcagtgagcatattgaatatgccggtgtgcattcgggggatgctactatccagttcccaccgcaaaaactgtatgtggaaacggtacgccgcatcaagcgcatctcccgtcagatagccaaggaattgaatatctccggtccgttcaatatacaatatctggcaaaggataacgatatcaaggtgattgaatgtaatcttcgtgcttcacgcagcttcccctttgtcagcaaggtgttgaaaattaattttatcgaactggctacgaaggtgatgctcggactgccggtagagaaaccgaacaagaatcttttcgagttggattatgtgggtattaaggccagccagttctctttcaaccgtttgcagaaagccgatccggtattgggcgtagatatggcctctaccggtgaagtaggctgcattggtacggatacctcttgtgccgtattgaaggcgatgttgtctgtgggctatcgtattccggaaaagagtgtgttgctttcaactggtaacgccaagcagaaagcggatactttggaagctgcccgtatgttacagaagaaaggttataaactttatgccaccggaggctcatcccacttcctgaccgaaaacggggtggaaaatacccgtgtttactggcccagcgaggaagggcagcctcaggcactggatatgctgcaccggaaaaagatagatatggtagtcaatataccgaagaacctgacagccggagagttggataacgggtacaagatccgtcgtgccgccatcgacctgaatgtgcccttgattaccaatgcccgtctggcaagcgcgtttatcaatgccttctgtaccatgacggtggatgatatcgctatcaagagctgggcggaatataaatgatttgaatgtttagtgatgtgtggttaatggggtgcggcataacagtgcactccattaactattaatcagtgacttctctttcattagaaaattattcactattctttctttgttcacaaaaagtttcctaattttgtccgattaggaatcctaaagatattcaatacaaatggattgtgaacacaagcttaaagcattagagcaggaaattgaatcgttgaaagaggagaacaggctgctgaaagaaaaattatcttcttctgaaaaaaactttgatagcgttagtttcaaggagaaatatgcggtaagaatattagattctttgccggatatgctcaccgtattcaatcatgaggaaacgggtatagaagtggtgtctaatgaagaaaccaatcatgtgggtgtatccaacaatgattttaaagggatgcgtatgcaggatatggttcctaaagaagcttatcacaatatacataataatcttcagaaggctattgcgacaggtagaggttctaccgcccatcatgaattggatgtggacgggacacttcattattatgaaaatcgtattttccccttagatgaagaatatgtactgataatgtgtcgtgatattagtgaaagagttgccacacagcagaacttggaaatatttaaacgggtactggataaggtcagtgatagtattctggctgtatcggttgacggaaccttagtttatgccaaccggcagtttattgaggaatatggagtgaaagaggagttgggcacacaaaaagtttatgatttacctgtttctctgaataccaaagaaatatttgataaacgtgttcaagagattcgtgataatggaggtaattttgcttatcgtgctaaatatacccgtgtgggagaaacaaaacttcgtgttcatcaggtttcggcttttatgattcaaaatcagggtgaggaaatgatttggttctttacacaggatataacggatgttatcaagaaccgtgacgaattgcgtgaactgaattatctgatggatgccatactgaataatattcctgtttatttgtttgtgaaagaccctgaggatgatttccgatacctttattggaacaaagcatttgccagtcactctaaaattcctgcttccaaggcattgggccatattgattttgaagtgtttcctgagcatgagaatgcggagaagtttcatcgggatgatttggaattgatccgtacccgagagcgcatggaaatgcaggaaacgtatgtgacggctacaggcgagacccgcatcgtgcagactttaaaaacattagttcctctggaagggcgtgcaccgcttattattggcatttcgtgggatattactaatatgcagaacatagagcaagagctggttcaggcccgtatcaaggctgagcagtccgacaggctgaaaacagcctttctagccaatatgagccatgaaatccgtactcctttgaatgcaatagtaggtttttcccgtttgatgactatggcggataatgcggcggatgaaaaactttattcggatattatcaaccagaattcggaaatattgttgcaattaatcaatgatattcttgatttggcaaaaatagaggccggtacattggaatacgtcagatatccaatggacttgggagaattgtgccgtaatgtgtatgagatgcacaaggatcgggtgcagactggggttgttttgatattagacaataaagacaccagcttgataatcaatgaagatcagaaccgaattatgcaagtcgttacaaatttgataaccaatgctataaaatttactttcaaaggggaaatccgttttggttttgaagtgaggaaggagtatattgatttttatgtaaaagacacagggatggggatctccgaggagaagattaaaatgatttttgagcgtttcgtgaaactgaatacttttgttcagggaacaggcttggggcttgcgatttgtagggtgattgtagaaaaactaggtggagagattactgcggaatccaaactgaatgaaggttctacttttcgttttacaattccttataaggcgggtaaaaaatgtccggaatccggaaggggtacgaagtgtccggaatcagggagtacgggactgagaaaagtattgcaaagaagaacagtactggtggcggaagatgtggacagcaactttttgctgttaaagacattgttaggaaaaagatgtaatctgctatgggctaaggatggagaggatgcggtgaatcaatttaaagaacatcagcctgacttgattttgatggatatcaagatgccccatatggatgggctggaggctacgcgcctgattcgttcttattcaaaagaagtgcctattgtcgctttgactgcctttgcttttgagtccgacaaagacagagctatagaagccggatgcgatgattttctgactaagccggtttcacaaaatgccttggaaaaagtgttggataaatatgttaagtagacattagcgaggtatagtgcgtaaagacagccgacaatatggaccagaatagggaagggaggatgcaatgcgaagattatagatcttacccccggaagattatagatcttgcaggtgaaagatttatatctttgggttgtaaggttacgatgaacctatagtaaatagaaacggacttttataaaaacaaaagaggaactgccctttcataggcaatccctcttttctgaatttgagagcatgttatttaacttcgataaccttagctgctttttctttgtcttccggcgtacgcttcggcagctcgatagttaatacaccatcgtttacttttgcatcaattttatctttatctacatcatcaggcaggatcaatgtctgttgaaatttagaataagagaattcgcgacgcaagtaacggctttctttcttgccttctttatcaccttcagtactttctgttttcttttccatagagataaccaagtcgttgtcttcgttgatatgaatcttgaagtcttctttggtcattcccggagcggcgacttctactttgtagtctttgtcactttcaataacattgatggcgggagctgttgcattggcttttaccatccagtcgttatcaaagaaatcattaaaaatacttggtaaccatgtttggtttgatcttcttactggcatcataatcttaatctcctataggttttggttaaacattttgtttatttctgaattccttcacctttcggttttgtcattcactatccataatgcaaaccgcataccattagttcgatgatatgcggtttatattgcactcttttaaacctataaaggttttcttaaagattaaaacctttgcattaaaagttggtaagcctctttaaacatttgattgtcaagactactgccaatttgtaattttagggggggacagattgacagtcgttctatatcagcttgaaccgcatacggaagattccgtctttatagtcgtagcttataattttaaatgtacctatttcggacgtatttttcacgtgttgacctatacagaggcattcgtcgtaatcgccgacttttacaatccgtacggtttcggaagctttttccggtaagcgtttcatgtcaaaacgtcctatagcttcctcttgagagataaattccattgtaacgggcaaatttcttcgcaatacttcgtttacggtgttttctattcttgtaatatccgtttcttccggacatgtttgcagcgcaaaatccagcttgctttttttgcgttctatatgggcggatattgctcgtccgcatccgaaaagattgaccattgtcctgtttatgacatgctctgtggtatgcatgggagggtactcctgtttattatggtcgttgagtgatggttgttccatagttattttatttttgttctgattttgatgggatattaaaatccgttcaaagataaattattcttttgtaatgaggaagcagagaggaaatgattgcttttgtattattataaaacaacgaattttaaaagatacttaatgccagagggggagcacattcgtaaaaatgtatgacgttcacgaggctctcaaccgattttcatgaggcatgaacgtcatactgattttactattttacatcacaggggtttgaaataaaaagacgaatgagtcgctgtcttttaaatcttttacggcatcccctgcataaatctttccgttggtgagaggcagtttcttgattccggctttgggactaaagtcgatttttttcaaatccaaccaaaatagattaggagtcatgaccgattcaaaataatatattttattcttctgatcggatacagagcgccagcgggtggaagatatatgaggtttgtccggtgtggtaattccgaaggggacggatacattacgcatcacactgagtacactgggtacagctattttagcgtccggagtctgagggattgcatgtatataaaaagaggcacgcacaaagcggtcgctggaacggtttgtacccggcagcatttgcaatcctcctatttctttccagtaatcattgatagctaactgataatcatatcgtggagaattggtcatcacttggaattcttttccttcgtgtatgcttaaattcccgtccagatattccagaaccgctgtatttcctgtttcatctgtaatagccaggtgaagagtggaagctgaaccgttgggcatgtggggagcatcaatgcggaatgattcttttttcagttcctcgacagcttcatgtacggtggcaaaattgtccagtacatattgtgtccatatactgattcccatgacaggacgtgtatctccctgacggtcaaagacggattctggcaaaaataacagactggcaaccaatcctttttcattcattccgtcacacgtacctatatcatatcctgttgcaatgacgctgccgtattttgaagtccatttcacggcattttctttattatatcctgcacgttgtattcctctggggaaaacatagatattactcataatatcttctttccaatccattgtacgtccagttattaccatattgtccggtccgatatagacggcacgcgtgcatgcatccgctttttgtacgctcatatagaacatacctgccaatgttagtaatgcaatacttcctttttttaatttcatgattctatcatttataaagattgtctttgccatttagaacaaactggataaggaacaggtttatagaaatgcagtgatttgtgatacatttgttgataaatgctaattcatcggttcaattggaatataaatgacatccgtgttcccttcataaatttctacctgattatcctattggagggattttgttgagaactgatttaagatagatcgaggtttgtggattaaaagaaatacttgttttatcataaaaataagggggataaaataaaaaaggagcaacgccttgctccaacctttgttaaccttaaatctaatactatgaaaaacacattgcaaagatacggactttttggaaaatagcaaataatcagacttaaaaagtatgctatataacattgtttaatatttgtatttctcgaaaacctgttttttaagacttcttttgcgtatctttgcagccgttaaaaaatagctgacgatagtaaaaagagaaaatatatggcatttgaagcgacaaagagagagtggggcgagctttacgcctttttccgcttgttagcggacggatatgtgtatgcaggtacgcctgatgtgaaaaggaatgaagtgcaaaagtttcctgtggcgatggtacagcgtgaggaacatgacgggacacgccgttatattctggaggatgaggcgaccgtacgtatttgtggggaaaagatagataagcagatacctcgtgaggattttgcggctgtggcagagttggtttttgctgctgtcaaagagagtcgcgagaatgatgtgatgtctcccgacggtgtggaagaatttttggatgaagtcgccatttatgacttggaagcaaagacggatgaccgtactgatttttatgttgctttttacggtatagaggccccgttggtaggtttttgcgttcgttcccgtttggggactatgttcccgttgttggatggagggcgtgccgccaatttgaagttcgagcagacaggtgttaaattcgctactcctaccgtaaacaaaattaatgcttttggtgaagaagatgatgtggcagggcgtatgttgatgatagaacgtttgggaggaatcttgaaatataatgatgtggccgataaagtattccgcagtaatctttgcatgatagatcttcattttccccgtatgttgggcgagatgttgcgtgtcatgcatttggatggcatatccaaagttagtgacctgatagaagcaatcaaacaaatcaatccgttgaaaataaaggatgaattgattcataagcatagttattatgaatataagatgaagcagtttcttatggctttggctttgggaatgcgtcctgccaagatctttaatgggatagattctgctatatccggttttctgtttgtagatggtaatggagagatactttgttatcagaaggctgaccgtcaggtctttgccgatttcctgtttgttaattcccggtttgagaaaagttccactgaaaaagataaatatggatatctggaacgtgagaacggagtctattattttaaactgaacttgaaaattggtctgttgaagagataggacaatgaaagaatttgtattttcctagaattaaaatattttttcactacagattacacagattgaaatacgatttattgattatttcaatctgtatctgtgttaatctgagtaatctgtagtgggaaactatagcttgaatttcagaatttttccattcattccatctagtaatacgggagttgttttgtccggcataagagtgagcttctctgtgtttccggtcagcaattcggttgcctcatattctccataacgatggatgcctaaataatcaaacgcatgttgcggaatattgacggctgaacgtgccggtatggagtcaaagttgaccataattaatatcagttcatcatcctgttttcgtaaaaaggcgtattgcttatgttcgttgaacacccatccggccagattggcataggttaagtcaaagaacacaccttcccgtatggctttttcactgttgcatatattcagcaggcgggtatagaattgtttcaattgcttttcatcctcattcaggaatttattgtcaaacttgcctccgttgcgccagcggcgtatgctgtccacactccagtaatcaaagatagtagttcttccgtcacgcccgctgaaaccttccgtatccatgccatgttctcccaattcctgcccgaagtaaatcatgactgggttggtattcatgcaagccgatacaatcattgcggggatggctttcgagccgtttccggcaaaataatcggaagctatgcgctgctcgtcatgattctccaggaaattgagcattcgtttttcgatacctcccaagctttgccagcgttgtggaatagcagttgccgattcccatccgcaggtaatggcgcgtagcgtatcatacagacctactttgtcatataaatagtcgaatttaccattgaacagataattcctgtattctcccggattatagatctcggcgataaatatcagttccggatgttcggctttgatttgcggaatcacccatccccagaattctacaggaaccatttctgccatatcacagcggaatccgtcaatgcctttggcagaccagaacagtaggatgtcacgcatctttacccatgtgtccggaatcggttcgaagtggcggctatgaccgttcatgtagtctataccataattcagtttcacagtttcataccagtcattggagttgggccatgcgtcaaaacggtcattaccggttgcttttgccggaaattctatgtaaggttccgctgcgccacggtgcaggtcgatattaccttccagttttgtatctggaatataatagaaattattgttggggctgaatgcttttgtcatatcatctttttcacccaaatcggttactccttcaggcttggcgtctgaaccatattggcgggctacatggttggggacaaaatcaatgatgactttcaatccggctttgtggcttcgttttaccagattctcgaactctttcatacggtccgggatactggttgccaagtcagggtctacatcataataatccttgatggcatacggtgatccggcctttccttttactactgcaggatgatcgggtttgataccatagcgggtataattggtttgggtagcatgttcaatgatacctgtataccaaatatgtgtagcacccagtgttttgatctcgcttaaagcctttgtcgtgaaatcggccatttttccgcaaccgttttcctccaaagaaccattaggcttacaacgcaggctgttgttcccgaataaacgggtgaatacctgatagataataattttttcttgtgtatccattttattcttttttttgtttatctccaaatcgttccattctccaggagtaatctgtccaggagttccgttgccgtattgtatcctttttcgaatatctcttcggctctttccagctccctgttgctgtattcttccagtccgtatgattcgatcagcaaatctgcaatccctttttgaggcagtgtattggcttggaaaataaaatgataggctctgagtgcgatgcttaccacattcttgctatattcatctgctaccagcgggtctacattgagtgctatcactttctcgcattctttgcggatggggcttaccggcaggttcatcaagattcctccatctacataatatgtattgttgatgcgtatgggggcaaacaagataggcatacagcaggaagcagccagcctttcggctattttcccttttttaaaagaaacgatgcgtccgtgatccaaatcggtagcggtaataatagtggggatttttagttcttctatcattttcgactccaggttgctgtttaagaaatcaatgaaactgtccagtttcagtagaccttgtttgttgatagaaaaagtggtcagttctttgaatgaatggtgctcaaaaagttcaacaatatgaaaaggttctttgccgtcggcatagaagacggcggcaagagcacctgcacttactccggaaagtatttccggcttgatgccatgttcatgcaaagcctgcataatccccaaatgggcaaatccttttataaatcctccgctcagggcataaccaatgttatatttaaattcattcatagtctgatctcgtttagataccgacaaacttacgaatatttttgtgaaatgccataaaaaaatacggattactcagcatattccggtaatccgtataaaatttataataactgaaatttatttatcaagcaataccgtgtgcgttgaccgatccatcaattttcttgatcagtccttgcagtacagcacccggtccgcattcagtaaagtcatcggcaccatcggcaaccatattcttcacagtctgggtccagcgtacggaagcggtgagctgagccaccagatttgccttgatttcagcgggatttgtgtgaggtaaagcgtccacattctgatatactgggcatttcggagtatgaatttcagtagcgttgatagcagcttccagttccactttggcggggttcatcagcggagagtggaaggcgcctcccactttcaacggcagggcgcgtttagcaccggcagctttcatttgctcgcaagccttgttgatcccttcgatagaacctgagatgacaatttgtcccgggcagttataattggcagccactaccacttctccttctttagaaatcgcttcacagatttcttctactttttcgtcaggcaacgcaatgatggcagccatcgtagagggttgtgcctcacaagctttctgcatagccatagcacgtgcataaaccagtttcagaccatcttcgaaagacaatgctccggctgcaaccaatgcggaaaattcgcctagcgagtgtccggcagtcatttcaggtttgaaatcatcacccatgcaaagagcggaaattaccgagtgcagaaaaacggcaggctgagttaccttagtctggcgcaagtcttcgtcagtaccttcaaacatgatgtctgtgatacggtatcctaaaatgtcgtttgctttttcaaaaagttctttggctaaagccgagttttcgtacaggtctttacccatacctacaaactgtgctccctgtccggggaatacaaatgctttcatatttttcctattttggtttaaaaacgttgcaaagttaattatttctttcggaactacggaataataatgaggcaatttgctaatatgctgcgttatgtaccgcatggtaattagcgcatagacaaattatttcattattttcatcgggacaggtgcgtaaaagtgattcagcggaccgtgtccttcgcctatatgcacgtctttcccggcgtggatgcctttggtgacatatgcttttgcatgttctacggcctgcggcatatcatatcccagtgccagaaaagtagcaatggcggaagaaagagtgcatcctgttccgtgtgtgtttttgctttctatcttgtctgaaataaagagatgaggcttgtcttctccaactatttgtaatacatcgcacatcttgtcgccctccaaatgtcctcctttcagtaaaacggatccgcaaccgaactttaataattccgatgcggcagctttcatttcgtccacatagcctatgcggtgttccgtcaatacttccgcctcactcagattgggtgtaatcaggctggccagaggcatcagttcccgggtcagtgcactgatggcgtcctcttctatcagccggtgtccgctggtcgataccatgaccggatcgaacacaacgaagcggggccggtatgtacgaaggcaggaggctatggtcttgactatttccacatcattaatcatacctattttaacagcatccggacggatatcttccattacggcttctatctggccacgcacatataccggtggtacgggatgtatggcacgtactcccaaagtgttttgtacggtgattgcagtaatggctgtcacagcataaccacccaaggcggagattgtcttcaggtcagcctgtataccggctcctccgctgcaatcggagcctgctatacttaatacacaaggatatttcttcatataaatctcattttgacaaagtatttgcaaagataacgaataatcttgttttaaatgtttgcacaagtgaagggaatcaattatttttgctaaacataaaataaagtaaaaataaggggaatgaaaagaatcctagtaacgggaggcgcaggatttatagggtcacatctatgtactcgtctgatagaggaaggtaatattgttatatgtttagacaactttttcacggggagtaaagagaatataagttacctgaccgggcatccgcgctttgaactgatagaacacgatataattaatccgttttggacggatgtggacgagatatacaatctggcatgtcccgcctctcctatacattatcagcatgatgctatcaaaacggcgaagacggctgtcttcggcacgtttaatatgttgggactggcgaagcgtaacaaagcaaaaatacttcaggcttctaccagtgaggtgtatggtgatccgttgtcgcatccccagagggagggagattgggggaatgtgaatcccataggctaccggtcttgttatgatgaaggaaaacgttgtgccgaaactttgtgcatggattattaccgtcaacatggtgttttggtaaaaataatccgcatattcaatacgtatggccctaatatgctgaccgatgacggacgtgtaatttccaattttgtggtacaggcattgcaagataaagatataaccatttatggagacggaaaacagacgcgtagttttcagtatatagatgatctggtggaaggaatgatgcgtatgatggctacggaagatcatttcacaggaccggtgaatatcggtaacccttgcgaattttccatatttgaactggctcagaagatactggaactgacccgttctcattctaacattattttcgaacctttacctcatgatgaccctcgtcagcgcaggccggatattactctggcaagagaaaagctggattgggagcctcacattcatctggaagaggggctgacgaaagtgattgattattttaaaagtgttctggctaaataatatatacctatgacatcggatgtaaatgttgtaataagtcattctgagtacactgttttagttgtggatgatgtggtttctaatgtcttgttgttaaaagtgttgttaacaaacgagaagtttaaggtgataactgccggtaatggaaaggaggcattatctcaggcggtcaatgcccgccccgatttgattttgttggatgtcatgatgcccgagatgaatggttttgaagttgccgaacgattgaaagccgatccggaaacacaacatattcctattatatttctgacagctttgaataccaccgccgatatagtgaagggtttcaaggtaggtgcgaatgattttatatccaaaccttttaataaggaagagcttgtgatccgtgttactcatcagatatccctggttgccgccaaacggatcatcatggagcagacggaagaactgcgtaagattattatggggcgcgacaagttatattctgttatcgcgcatgacctgcgttcacccatgggatccattaagatggtgctcaatatgttgatactcagtcttccgtccgaacagatcggtaaggaaatgtttgatatgctgagcatggccaatcaaagtacggaggatgttttctctttgctggataatttgctgaaatggactaaaagccagataggcaagctgaatgtcgtttatcaggactttgatattgtggggaatattgcttcggttatcgaaattttcaatctggtagccggtatgaagaatataaaggtgaacttcccggtgcacggaaagattgaggtacatgccgatatggatatgatgaagactatcttgcgtaatcttctcagcaatgcgatcaagttcagctataatgattccgaaattctggttaatgctggaatagagggtgataaagtcatagtcagtgtaaaagatactggaaaaggcatgggtgaggaagatcaaaagaaattgttgaacacggaaactcatttcagcaaatacggaacgaataatgaggaaggttccggattaggcttgttgttatgtcaggatttcgctgttaagaatggtgggcatttatggtttgagtctgaagaggggaaaggttccactttctttttctcggtagctttgaagaagtgatttatcaaagtcccacctccagatataccgggttatggtcactcatatcataaggaatcaccttatattttataccttccaataaggtggaatggaacaagtagtctatccgtagtaaatggtgaaccccccggtaagtggctccgtacccttctcctgcggtttgaaatccgtctttcaagccgcttttcagcgtttcataagtaaaagttcccggagggtcattgaagtcaccgcatacaatcaagggatattccgtggcattgattagcgaactgatttgttcagcctgtccggcacgtctgacagtattttcccggaagttgtcagaatagtccagataaatggctctttcctgttcctcatcttgtgctccccgagcctgtgctgctttggaacgcattctgtcaaagttggtagtctgcatgtgcacgttgatgatgcgtatcgtcataccttttacatccaggtcggcccagatggctccgttattggtattcggaaattctattgtttgtgactgtttgatggggtagcggctgtaaatggcctgactcaatccttcggggataaacgagtaagggaatgttttagcatacgtattctgtaaatcctgttccgtaaagtcgccattacctctatattcctgaaaacaaagtacgtccgtttcctccttgttcatcatctcggcaaactctttggcggagaatcccgtgatttcatttccaaatgagtggacattgtaagtcactattttcagtctgttttcgttagcatacttggtagggttataaatttggtacatggaagtgatgtattcgtagtttaccatcagccccgtcaatggaatccataaccaataccggagtctgatgagccagtaagtaaataatatcgtattgacaaccaccagtataggtttgcttaaagcaacgtacgcggcgaacatattctctaccggatttattttacctgagaaataagcgaagatggaaagtcccagaatgaagattgtgaacaggatagataaaaaataggcaaatttgtatacggctaatcttcccataaattacttttgttttagatacttgtttatagtcattttcaataagtcggcagataccggtttggttaaaaaatcattgcatccgctttctatggcagctattttgtctttttcatatgcgtatgcgcttacagcgatgacaggtacgtcggcagacatttcccggatggctctggtggcgtccagaccattgatgttaggcatttttatatccatcaaaatcaagtcgggtttgtattgttcatagaatatgatagcctccatgccgtcatgagcatgcaccagtttgtatatttttccgatcatagcctctattaagtcataattgctttgatagtcttccgccactaggatgctcatctcctgatgggaagttctgctgttgtctttaacggaagctggtggaagtttttcctcccatttcatatctccgtttgctgaaatgtaaggcaatgtaaaagtgaatgtggttccggtttccatttttgattgtacagctatttttcctcctaacttttctacaatgattttgctgatggaaagccccagtcctgtaccttgcacctggttgttggccatgatgaaacggtcgaatatcttgtctatcttgtcatcggaaataccgcttccggtatcggctatatgaaaaacaatttctttttccgtcaatttatatccgaagctgatagaacctttggctgtgaattttgtagcattacctatcaggttggagaaaacctggaacaagcggttcctgtctgtcgagataaccagtgacggatcggactcttcgaaaacaagctccaccccaggctgacacctgaaactatacgtgttttttacatcctcacataaagtataaagggatacaggcgcatagttgaattccatcatgcccgattcaatcttcgacaggtccaaaatctcgttgataagttcctgcaggcgcatgttgtttttttctacaatatcgtaatactgcaatctttcctcggcgttttccgtttcagctataatgcgtgagaatcctagaatggcattcaacggtgtacggatttcatggctcatattggcaaggaaggcagatttcagctggttggagcgttctgctttccaaacaatctcggatgtgttctgtatatatccttccaatacggtcctttgcatatatacctctttatgatatgtttttattctcatgttgacggtctttccgtcaataaggagtttgtagtttatggtattggaagcatccttctccttcagattttcttccagccattgactgaaacgggccttgtcatcaaggtgcatatagttcatgtattcatctatggaaatctgtttctgttcctcatcgttacagaatatctgggtgtatcccgaataagtgaagaaccgtgtggacgaatcgtatgcccataatcctattcttgcggctttttctatttcgcacaaatctttttgctttttttccagtttcagcctgacgacactccggcctgtgatatccctgtattgaaaaagaaaatgctcctcatcatacttgctgataatacatttgtagtattttacgtcatcttccaatattaatttgtaattccgtgcggaaagtttgtctcctgcccgtactttggtgaattccgcatacatctcccgtgccgtttccacagggaaataagagaacctcaaatccgcaactacgcgcctaatatgatacagaagcgaaaagaatctgcatcgttagtaaaaagggggcacagtgcatcgaatgtcaccataaagacatataaatgccccttaccccaccatgcgacttgaggcaatacgcaaaatcacgactataagttgtcggtgttatccaaagtcattctggaacacattggcataagcattgttgcatgaatagatattcagcacatacttccttgatgtcctgacccatttggctggcacagagatgaacttaaagacaaacgtcttgatgcggcttgttgctttgagtccgaacctcttcacgtcaagcctcgccatgatgaatttatagaagttgcgtatgagtgccataagcagaagaaacaccgtgttttctcccataaaggattttggaagcctgttccagccgaatccgttattcatatcatcgaagatgcgttccttccctccacggaggttatagaattcgacaatctctttctcggaagactcgtagtcatttgtaaggatgcagcggtaggtgtattctccttcccacaggtcgagttcgccgtctatccgcttctgtctttgaatcacaagacggtatgccttccctttccatttctcgatgagaatggaggccagctcaaactcaatgccgcccaattccactttcttccaacctctgagggcaaagatgtcattgtagagcgaactgcatcggttagcacggatatagaaggtcttgcagtgtttagcaatctcttccactatctcttcagaacacgagccgcaatcagctctgaaacggttgataataagcttgttttgttcaaacctttcaaagaacctcttcagcgtgtccttctggtggaaacggacatttgtgttgccgtcgctgttctcaatgccgacaatcaagttgccaataaccgccacgccagggcgataaccaaggaacttcttgtatgtaggcttcgcatcaaacttctcagcctctatgaactggtggtcgaagtcaacgtcatacccctcgccctctttcagctgccctgtggacaataggcaattgaggagcagtgtattcagcttgtctgccgtgttgaagtcgtaggtcttgccagtgtcggatgtgtaggaaatgttatcctgggtcagttcctttatggctctaagaatcgtgtcggcactgcatgtgcgaagtgtcggatgaagcgaaaggtggtacatcagatgagtggtgacatcctcgatgcatgagccgccacaaaaataaacgctcataagcgaacggatgatttcgctgtattgataaccatacagcctgcatctcataccgagggttgagtcgattacagatgagagtctggagtcaaattgctccattattgaaaatattcctccaaaaggagtgagtttctcggatttaattgctacctttgccatgtctgtcgggtttgatacatattttgatttgcaacactaagataggtgaaaaatctgacatggcaaattcctgagcaactttttgttgctcaggtacttaaaaagttatatttgtaatagtgttgcggaattaagggagaatatatttctccctataatatcttgttcttttataaagaagtccgtcgtattagccttgaagtctaaacaggtgccgtctttatatacgaaaaacatagtatcagccgtaatttccagaattttgtctgcatactgcttatcgtgcaatatattactcggaattttcatattaatagtatgattctcaatatactgtttctcttagcgaatttagatgcgtgatatttgttactgacagcaaatatacaaaaaaaatattgtttatatcattttatatcgtaattttgcaaggtaatcaatgaaaagaagaaatgaaaaagattttggtagctgaagatacggaaagtaattacctcttattatctataattttaagaaaggagtatgaagtttaccgtgcccacgatgggcaggaggctattgagaaatttgagggttgccggcccgatatgattttgatggatataaagatgcctgttatggacggtttggaagctaccagaagaattcgtctgaaaggggggacacttcccatcatagctcttaccgccaatgcgtatgacagtgaccgtgacaaggcttttgaagccggatgtgacgattatatggccaagccgattatggctcccgctttgcgtgagatgatagaaaaatattttggtgagtaaatattatgccctgcgggatttttcccatgttccgccggcatgtcttttcaaatagaagaaaccttttatcacattgatgttcatgaacaggaaatagtagggaatataaagcaatttgttctttacggacttggcagacaggaagctgccataaactcccccgaggtagaatgcggattgcagcagaagaaaaagaaagtaaaccggatggctctcactacagacaaccagcaggatattcaggggaaagagcagaaacaaggcaaccggggttaccgaccatctcagtacgcggtgggagacatattgaaaactgaggattccataacgtagaggatttagcagttctttcaaacgatagacggactgcaatcctcctgctgagatacgtatttttcttttctcttcttctttcatatcggtcgatccgctttccaaggcatatgccgtatcacaatatgctatcgtatactgcttcatggcgatacgcagggacagcataaaatcatccagtagggtatcttcaggcatttcctcatataacggggtgcggatggcaaataattctccggcagcacctatggcggaatagagctgataatccatttttttcagccatgattcatatttccagtacaatccttctcctccggaaacagctcctccggtactgtacatgtctacccgtttttctcctgccacgcatcccacctgcggatggttaaaacattttactatctcgcgaacggcctgcggattaataaatgtattggcgtctgtgaatatgaccaaaggcgtggtgacaaatcccattccccggttcatagcggctgtttttccttttctttcggggacgaacaatagggtgacatcgggatacgcttttaatttttcattggttcggtcattgctgccgtccgttacccatacgatatgcagtttctctttgggataatccagttcgtggcagtttttcatctttccgtttactacctgttcctcattataggcggtgatgaacagggtgatttcgggcagggcggtgttgttgccgttccggcaggtttcttgctccggttcgtccgtatcgtagaagaaaagaaaactttgttttatttttaccaatatccacaacaggattccgtatcccacataggtgtagaatacaatgaacaggaggatgaagaagaggatttcaagggtgttcatgctagtatttctttatatattttcaatatttctctggctgtgttctcccatgagaaccgacggactctttctaatccatatgcagtttgtgactcatagaattccgcattttcttctaaatgaaggagggcggaagcaatttcctccggttcgaacggattgaccagaataccctccggtcctgtgatttcgggcatggcggaagtggttgaggtgatgacgggagttccgcaggccatcgcctccagaatggggatgccgaaactttcgcgtaaagacgtgtatataaagacggatgctccactataaacagcgggtagttctgtgtttggaatgtatccgggatgatacagcattttttttatttcttgtaatccttgccggttcagatattcgtctatgatctcttctttcaggtcggcgataagcaagggaaggggctgacgggatttttttaaataaataccgtatgcctgcaatacccttgccgtattcttcttgggatcggtatttcctaaaaagaacaggtaaggatgtttctttatgtatcgggcagtggtggcttgtgcgttccgtatgggtatgaaatgttgtgaatagccgttgtgtacggcgacaagcagttgtctgtcaatgtgcaggaaatgactgatgcggttgcattcaaaatgagaaacggtaatgattcttttgcatctagtaagaatttggggaacaatgattcttcggtagaaacgtcccagtctttggtacatggactggttcttgccttgttttttttctagaaagataatgtcgtgcagtgtaagcaccagtggaatgtttccatacacaggggcagtgttacttgtgcagtgcagcaggtcgggtttgatttttctcaaagccaacggcagtcctatctgttcccaaagcggataggacggccagttgacggtcacgatatgcacgttggcggattcctgcaaacaaatatcatcccccgggctgaccagtatgaagtattcgttttgtttgtctatcttttgcagttcccggatggtttccagagctacatagtccatgccatgcttttcttttctgaagatgcgttgggcttctattgctattttcatctgtcgttactttatcaggttagaatcttcgtcctcgtaattgtttttgctatagaaaagagccgtgaagcttcttaaaccttttatggctcgttttttgaaactgctaaacagggatccgtcggccgagacagtaccatagccggtaaggacacgggctttgcgggcggtgacgaatcttaattttccgtattttttcaatgccagtgccagggagccgtcttctccgcggagtatgtctgtccggaatccttctttccgggctgtttccgtgtggaaggcaaaagccattccacgtacattgagttccggtctgttcagattttgtattttcaaatagagatcacgtagtgtttcatagaagaaaagtcctaaatgatgttcattaggaagaaaactccacagggcgtatgcacctgccacttctttgtcctgtaagacctttatcatggtactgatgtactggggcggataaagtgtgtcggcgtctatgcagagatgatacttcccccgggcatggttcagtccgcattgccgggcaaaaccgggacctttccggtattcattgaagtaagtgactcctaattcttttagtacctcttcggtgtggtcggtagaatgattattgatgactagtatttctacaggatagttatgttggttttcacataaagaccacaggcagctcaatatcctcttttcttcattatgggcgatggcgaccaccgaaaccagcggagcatgagttgcaagctgccggatcttgtctttcacttggttgataaccgcttgtggggcttgggtgaaaggcttgtcatagatggataaatagtcagcgtaccacttcatgcgtttttatatattcggacagtgtgaccggattccggtgattactgaatcgtgatttgaatttgtttttgaggatatagaacagggcttgaatcatcttcttcatttccgtcagggcggaacggcggggatatagtttctccaccatttcccggttccatttgttgaggaagaaagaggagtagtattcatcttcgggattgactagtatctccacttcatctttccactcataacggttcaaggttatatctccttccgtcagccacagcagtttgtaggggagggattggaaaggcagataattcaggaataattctccatagtcgttttcatagtttcccggcatcttgttcttttcatagaagaccagtttgttgtctatatccaatataacccatttatgtgattttttgggaaacaagtattcgcccagcagactgggagtttctatgtatccccgtcgggctaccctgcataattccttgacaaaagcttcgggatgttccacgtgttccaatacctgattgcatattacgtagtcaaactccttgtctttgaagggcagtttttctccatcggcatgtacaaaggtctgatgcgggtatattttcacgtcaccgcagcggtggtaattggtgtcaataaatttttcgactatcacgttggagcgatatgtcggattatggcccggacctatctccagcactttgtcgtttttatttatatggatgtctcctctgtcgtagggggaatctgttttcattgttttgttccgtttaataagttgttgaatagctgaatccattgttgcattattacatcttcagcaaaacgttgtacattgatgcgggcttttttccccatttcttttcttatttgttcgttctcaatcagataatttattttttcggccagttcttctgtttttccattttcgaccaatagtccgtcttccccgtcccggatgatgtctttaggtccgcacggacaggcgaatgacacggcaggtactccgcacgccattgcttccgctatgaccattccgaatccctcaaatctggaacttgatacaaagatagaactttcatggtatttacagagcatatccggggttgcattttcaagaaaaaggttctttaatttccattttccggccagtacttgatatgtagtcttgtctcctttgccatatatatgtaattcccagtccggatgccggttacagactttgctccatgcttccagtaacaaatcgaatcctttttgataagtatatcttccggctgcggttatccgtttattgttcaagtcgctgaatgttccggattgaaagggtagagggttgctgataacttttacattttgcagttcgggccagttggctctgtcttcctcactcagtacaacgaacttgtccagcttttttaaatgcctcaccagacttttcatccataatttggcaaaaagttccttgatgaagttgctttcgttcttttcaaagttacgatagtttttccggtttacgtgtagctcccctatctttttgcttccatctttgagggaagtgataaagtttatttcccgtcgtagcaaagaaactgtgatgtccggtttgaggtgagacaaggcggcagagagcttgcgtcggtatattctttgttttttcagataaaccggcacttttttccaaagaggaagttcccataattcttcaaagtctatattcagttggatgatttttactttgggcgataaagtatagcagggaggcttgccttttccgtcagtcagcaaaatatatatgtcataattaccattctccgctagataattgactttggtggtcagtaccctttccactcctccggggatatggagagagggggtacaataggcgattcggatcataggcgggagtattacaggttgtttattactttcatcatttgttctttccatgacaggtttttaatggaatcccttattctgcaaggagacagatccagttccatatagaaccggataagccggcggatatctatgggactttcatcggctggaactttcagtatataaggcatcttgtcaaagtctccatctgtttctgaatatacaaaaggtattccccgtgctgcatattctctgttttttaatgttttgattttgtcgatgccgctgcggtggcgtgccagactgccgatggcaaagtctgcttcgttgaataattcgtctagttcctcattcattttttgtccgtggaagatgacatatttctctatatgatatttgttgataagttcataaaatccgggagcgtgttgtgagtcatgcatttcggatttccatataccgcctgcgatgtggaaaaatacggttgtgtttgccgggttttggtaatatttacccaaaccgtctatcaggcggtcgtaaccgtgccaataatgtacttcggccactcctaatagatgaatgacagaggtatttttagaaagcatctttttcagcgggatggaatcaaagtcaactccattggatatctgaatggtacgttggccgaatatacggtgatagtctgagaaagtgacgatggcgttcacgtgttttgccagtgtctttcggaatactttatccacttgtatccccaggcgtgtggtcagtggaaaaccggtgtattcgctgtcgtaaggataggtgggtatttccatcgctattttaattccggctttccttagtttgctgaacagccggatggtgaacggatttgcattatggaaagagcgtacgtagattaattccacttgatgtgttacagcatagcggtatatgcattggtaggaaactctccttttcgccgcagctggtttgcctgttccgtagtcgtctattatttcatcgtttatcatccttacccggtggccgttgtccgctatgctgtatgtgcataaactgacccggtgtccacatgtttcaaagcctttaacctgatacaggatctttttgctgatgccgctgtaaggggatagtccgtggaaaaggagatagatgatattcatagtcgggtagttgttaaagtgttgaatagttcatcccacagtttcatcacttcttcgcgtaaataacgttggatattcttttgggcctgctttcccatccgtatgcgtttgtccgtatcctctatcagccggcatatcgcgtcagccagttcgtccgtgtttccgttcttcaccagtattccgtcttcttccggagtgataatctcggcaggtccgtatggacagtcgaatgaaatgcagggaacaccacatgccatcgcttccagaagtgccatcggtaatccttcaaatcgtgaactcatgacgtatatggaactttccagatatttttcttgaatgttttttgtcggagggcatagtgaaaaactgttttctatatgatgcttttcaataagctcttgcagactgttcctatcctgtccttctccgtaaatgcggatatgccagtcgggatgcttccgattgactttgatccaagcttcaatcaggcggtcataccccttctgttcgctgtatcttcctatgctgatgattcttttttccaggcaggaactccctttttggggtgagaaaggtaagaagtttggtatgacacaagccttcttcacttctttccaattatccgcatcatgttgtgtcagaacaaccagtgcgtccagtttttttacagcttcctcctgtttctttctccaatgccgtgcgatttgcttgtatgggaatccccgttgttccatcagatgcaggttacgagtgtacggtttagctatatgggattctcctatttttacgcttccatcgtccagttgtgtcagaaaatccaattctcggcccaatgtgctgatgacgatatccggcttcaaggttttcagccaatactccagcttctttctgtacaggtacatcagggtaaaataataatatcctcttactaacaggttgtgatgatactgtctgtcaaaatcaatcgctatgtcaatgtgcctgattctgggagatatcgggaaaacgggcggtcgttctttttgtgaatctgtgataataaatacatcctgatgcatttcgtcagccagatagttcgctttttggatgatgctccggtctgcgcctcccacggtgcatagtgctgtgtatagataaacgatggtcatttttcagtcagtttatgaaacaacatttcccattgcggcatgatgtttcggagtgagtagcgttttatattttgtttagctcttttgccaaaagcttttctttctgcttcatgttctatcaagtggcaaagagcgttggcaaatccttgtatgtctccgtttttaacgaggagtccgtcttcctggtttctgatgatttccgatggaccgaaaggacagtcgaaagaaacacaaggaacacccagactcatggcttcgatcaagaccagtccaaaaccttcgtaattggagcttagggccagaatggaactgttcaggtattcttgcgttatgttttgtgtaaaaggatgaattgtgatggagtgttccagctttctgtctttaatctgccgggttaagctatccttataaaatccttcaccaaatatatccagtatccagtcggggtggcgtttctgcacgatattccatgcgtcaatcagtctgtcgaatcctttttgccaggtcagtctgcctgccgctattacacggggagcctcacaggagctgattgtttgtatatcaatagaggtggtgttcggaatgatatgtatattcggatgttgtccccacatggcggcatctccttgtgtcagtgtgactatagcatcgctgtatcgttttacatcacggaaacattggtagctgacgtatctgtcttttatatctttaaaaaagctctttttgcggtttgcaggtatccgggtgtatattttggcgcaatgtgattcaatgattttctttgccttgcagtttaatttacagatcaaatccgctttgaaactggtatttcctgatatgatatcgggattgatgagcttgatctctttttttaatttttgttcgaatttatggttcaaagtccatcccactttcaattgttcgagaagcggatgctggtattgcaaatgaaactttgtatccagatcgatatgttccactttgtcggataacgggaaagaaagaggatgattgccttgggaagaagtgataagatagacctcgtgcccataaatttcggccaagtaattcatcttatctgttaaaatccgctccatgcctcctatacgggctatagagtcgtatacatatactattttcattcccctgatttgtttttccgtaaaaatagtgtattctttttatatatccaataagaagttgttgaaattcctgtccatatccgtttttttatggaatgtcggctgtattcggagtaaagagtgggtttcaagggatgaagatgggtctatttagtaattaaagtctttggaatgttgtgagtatcatttgtttttgcgaatattgcattttataatgattagcagataatgatgaaagagataacggtggtgatgccggtttacaaggtggaaaaatacgtatcagaatgtcttgattccataatcaaccaaacttttgattgttttgagtgtatcatcattgatgattgctctccggataacagtatgtgcctgatagaggaaaagctggccggatataaagggaacatcagttttagaatcgtgagaaatgagaggaatgaaggagtctctgcggcaaggaacaagggaatagaactatcccggggtggttatcttttttttatagattcggatgatatgctttatgagaattgcctggagaaattatgggaggaaacgaaaagatatccgggggttgacttggtgcagggggattcttattcagaagggatggaaaacaaaaacagtgatttgcaaagatatacggaaggacggatacgtatcaacaagctgtttctggattcgaaaataacatccactccggtcaacagattgatcagaaaggaggtgctgacagagaatgccatttatttcaggacgggcattttgtttgaggactttttgtggtgctattttctgtataaaaaggtggaaatgtttgcttccgtcaattcttttacttatttctacaggcgttcaaatcctttctcaaccatgaatagggcgaaaacggactttgacaagccggcaaaggattttatttttatcttgaccgtttttaatgagcacatggaacaggaactatatgctgaaaatatctgtttcattttgaacaagttgatgccggtggtgtataatgctgctgtaataggggttacaagggaaagtaatgatgcgatagataagtttaaaagaaatctgataaggaaacattgcagagagttccggcctatggaggttttgtatgaattgaatttgttctatcctttttctctgcttttgaattgggggatttacagacatcacatattgtataaatacgctaatctgatcaaattgtattataagatatggggaaggtggtatctctgaatcttcttgtgtaatgaatattattcctttaggttggtagtcttcttgttacattggttgtcggtttcttttgtagccggttcattcatatgtgataggatagcggaaaaagcataatataattctttgaatgcttgcaggcggaagaaaaacaggtattcaaaaaagtatttggcggggagccattcttttgtttttgccgaagggatacaccacggaagtggtgacaggtaatagtggattttttcttgtcgcaacagtctgttgcatttcatgcttgcgttgaaccgtatgattaaactctcgcggtcttgtttggacatagcaagggactggtcggattcggtacaataataaatgattcttctgtctgtggttactttgggggcatatataccgacaaggcatgaaaaatacacatcgttggctattcttgtttcatcgaattgaatgtggaatgttgacaggaagctgcgccttatcattttgccccaaggaacttgagattggtatcgcagtttgttttccgggtttacatcattgaagaagttggtatagtaagttccgcgtcggctttcttgggacggatcatcggacatgacaaaacgtacattgaaatagatgacttcatgggggctgtccatgtattcgtttaagatagtaaaacaattggctgtaaagaaatcatctgcatctgcaaagataatccatttgccacgggcgtgggagagtcctatgttccgtgcgtatcctgctccttttccctccttagtgaacaggacttccgtattttttctgccgtttcccggaaaatgagaaaaatcgacagattcggaattgctgttatcatcaatgataatgatttgaatttcatcccaagtgggaattgagcacagacagcgttccagaagacggggagtattcttgtgcggaataatgatgctgtaatgataacttgtgttctttgtcattcttcttctttttgcaaagatattgatttatattcagcatcatgcattatcttgtcaatatctcgatgagtatgagaatctttcactgaaaattctgggtgataatgccctcatgccctcactgtgtgcacaactggttgtttatgaactatttgtatagtgatggtaaaaattgtaactctcacttatgctctcatgccctcactgtttttgagaacagaatttcacataatctatttgttatcagttatatatcctttttttataagttgttccggtttaatatgaagtaggtcgttctcaggctttttctttgcaaaaagtgcgtctgaagggatcatacctctacggaatatggcgaatttccggcagcagtaaaaagatcaggaggttttaaaaaaagctcgccatctttttaaaaaagaacaaggtcttttttttatttgacctgttgtttttgggtgtgcaggatttcacatacgtatgtgtcgctctatgcgtatgtacgtgccgcatatacctgctttgtattatatgatattctttcctcattccgcatttattttcgtttctttatcgtatctttgcgaagaaagagtgtaatctaaattccatgagaatattattttattgtgatactgtcttcagtttcggcggagtacagcgtgtgttggctgaaatagccaaggctttgtccggaaaacatgaagtcacgatactgaccacggatacttgtacggacttgtcgatgtacggatatgccgaaagtaccgtgcagtttgattctttctcttattccgcctcctctttcatcgagcgtttgttatgtaaaagctatagttttttatataaacatgggttgcctcatacccggctgacttcgaaatggtatgctgccagttttttcccttcttcttataaacggacattggcaaggaaaataaatgcccggcaatgtgatgtagtcatcggggtacatgcttttatggctctgcacctctctgctgtaaagaaccggattcaaacaaagactgttgggtggctgcataattcttatggagcattctttgagaaagaaactccctatttgccgggattggattatttttttcaagtccagatgaggaaattggacgagagggtggttttaagtcatgcagatgccggttgtttctttcggaaaatgaacctgtgctgcgaggtgatatacaatcctctgactgtactgcctaaaggtcggggaaagaaggaatatagaaggattttggcggtcggtcgtttttcattcggacataaaggatttgatattttaataaaagctttttctgtttttgtgaaaactcatccggactggacactggaaattgtgggggagggtcctgaggaagcgctttaccgttcattgatcaatgaatatgaactggaaaagaacatggcgctgcatccttttacgaaagaggtgcaggaatattatgcacattccagtatatatgtgttgagttcccgttgggagggattcggcctggtgatgatagaggctatggcgcacgggttacctgttatcgcatctgatttaccgataacgcgcgagttgttgaaagacaaagatatggccgttctttttgagacagggaatatagctcagctggccggttatatgtcgtatatggctgatcggacggattgggaatggatggaaaataaggcggtggaatatgctgatacatttcatatagagaaggtctgtgacagttggaataatttactaaaaaaagtagtgtatggtacaagatgaacaggaaaaatgggatattgtgatcaagcctcggtccggtttgttccggttggatctggaggaggtatggcggtatagggatttgctggtaatgtatatcagacgggatatcgtcactttttataaacagactgttttaggaccgttgtggtttgttatccagccactgcttactaccgtcatgttcatgtttgtttttggcggtattgccggtattcctaccgacgggcttcctcaaccgctcttttatatggcgggcttactctgctggaattatttctcggaatgtttaagccgctgttcggatacgttcaacgccaatcagaatatatttggaaaagtatatttccctcgtctggtggtacccttgtccatcgttatatcttgtatgataaagatgggcattcagtttggactgtttgttttaatttatatttattatttgtgcaacggatattcgttgatggtcaacggatatgcttggttggctcccttgctgctgctcatgttggcaggtcttggtttggggttcggattattgatatcctccttgacgaccaaataccgcgacttgcgtttcttgattactttcggggtgcagttgtggatgtatgccactccggttatttaccctttgtccgtgatgaggcagagccatgagcagtatatgtggatcattgtggcaaatccgctgacttccattatcgaaacatttaaattcggatttttgggagtggggactttcagttggtttcacttaggctacacgttggtgtttacagtggtgataatgctttgggggatggtgacttttaatagagtgcaacgtagtttcatggatgtgatttaaaaggagggacagaatgggaaaaatagcgatagagtttcagaatatcagcaagcaatatgcattgggaagtatcggagccggaacgctgagccgtgatttgaatcgttggtgggcgcggattcgtgggaaggaggacccgtatctcagaatcggggaagagaatgaccgttccaagcaagcgatgggggattttgtatgggcgttgaaagatattaatttccatgtggaggaaggggaagtgctgggtattataggtaagaacggtgcgggaaagtccactttgttgaaaatcctttcgcgggtgacttctcctactgtcggttgtatccgtgcacgggggcgtattgcctctttgctggaagtgggtacaggctttcatcccgaaatgacaggacgggagaatatttatatgaatggttccatcatggggatgaccaaggcggagattacccgtaagttggatgagattgtggctttcgccggtgtggagaaatatatcgatactccagtgaaacgttattcttcgggtatgaccgtgcggttgggttttgctatcgctgcccatctggagccggaaattctggtagtggacgaggtgttggcagtgggagatgcggaattccaaaagaaggccattggcaagatgcaggacgtggcgaaaggagagggacggacagttttgtttgtcagtcataacatggcggcggtaagaagtttgtgtacaaaaggaatatgcttggaaaatggtaccgtagtttatcaggggacggttcattctgccattgattattacttgaaagagaaagggacggtccggaaaagtaaaattatagattatgtgggttggacgaaaaatacgcttcatatagattgcattgagataaacggaacggaatgtgcctcttccactattcatggaggtcagaattttctgactgtgaaaatacagggatattctgaagaggatatgatgtatgatgtaatgctagttttgaagagcaggacggaagtgccttatgctagttatgctccgggacattattacggaagtatcagtcatttacctaaaggggatttttgcatcgagaggcgtatagggcttccgcctgtgctgagtaaaggtgtcctgcaggcagatttgtttatacatcatcctatggtggaatattatttgaaagcagttcgttgctgtttgctggaatgtgagggatttcaaagtggattcggacatgcgctgacacaaacgtccaacggctttatcggattggaggatataaaagtttgatcattatgttctactatggagatgaagaaaaaaagaattgtatatagtttgactggaagagggttgttctcagagttgtctaatcttgcattggcattggtctatgcggactataatcaggaagagctgactgtcaatacaagaaactggaatgcaagggtggagaaaggctggagtgattatttcgagtcggtcttgccaaactgtaacggggtgatgtgctcgcaatatattgtttataagaaggggaagccttggtggggaaatatctattataatccgtccgcttttttccggtattatattttctatataatgaataggatatatctgttatttcatccggaaacggaactagggaatgaggtatttctaaaaatgagatcggaggagtttctggagaagctggaagatatcagaaatgattatggctctgccttgcggaaaatattaaaatttaatgagaagacaaccggttatatagaagaaaggaaaagtgagatgaatttgccggtagattacatagcggtacatataaggcggggagataagatagtttcccgtgagatgaaggaactcggtttgtctctttatattgatgctgttaaagagaagaagcatatcagccgtaatgtgtttatagctacggatgatagttctgtgaaggatgagttgaaatccatactagttgccgaaggatttaatgtttactgtaacacagctgtgacacaaacaggatttgatgagtctttgtttaatacaaaggataaaaaaagtagatatatagatacgttgaatatgctgttggatatggatattctgatccattcttcattttttatcggtacttatacttcgaatgtcagccggattgtgcctctgtatgtcggattcggaaaatcgctcagtctggatgacgaatggaaactttagattgtaaaaagcgaaatattatgtcacaaagaaaattttcgattataaccattaattataataataaagaagggttgaggaaaaccatagaaagtgtggtcggccagtcttttagggattttgagtatattattattgacggagggtccacggatggaagcattgaagtgataaaagagtatgccggtaaagtggactattgggtatcggagccggacaagggtatttatcatgccatgaataaaggagttttacaggcgcatggagagtatttgaactttatgaattccggtgatgaattttataacaatggtgtgttgcaggaggtggcaccttcattggacagcgatattgttgttggaaaaatagtgcatggcacagaggtgtggggctttcataaggaggatataacgctgatggatttgattcggggaactgtattgcatcaggcttcgttctttcgtaaagaactttttgatgaaaacaggtatgacgagaattataagattgtatccgattggaaattttatattcagaccttgatattcaacaatgtgacgttccgcaatattcgttccatcgtttgtaggtttgtgcctggaggggtcagtgaaacggatgccgggacaagagatctggaaagaaggcgggtgtataaggaattgtttccggatagaatgataaaggattatataagactggaaaaggtggaatcccctttattggaactgattcccgaactgaataaaactgctggccttcatcagatggcatacaaattggtctgtgccttgttgtgggtgcatggaaagataaaacgggtgcgtgttaagtaagcagtaaattgtttttttcacttgagccatgcccgcaggataagtctgatgccatatagcgcatactttatttttagagaaagtggaagatgtatataattgttttttctgattcttagcattctgtcccataattcattgaaggggatttcccgtgagtgttgggtatagaacaagaacgaactttttatgtaatcggccgacaaagcacgtagaatataggtggggaatgtggccgaaagtgaagtcatcaggtcgaatgcatccatgaaagtgcacagtttgggggtgtagtttttttgcgacaggttcatggcgcttgattttcttgtgacatagtgataatagggggaagtggtgtatgcggctgattggcagtggctcaggtattgaaaaataaagagtctgtcttcattataataaatatgttcattgaattttaggtgatgtttgtcaatgatttctttatgatataatttatcccataagtttcctttgtatttgtaatgcctgtcgttaaacagggagtgaatggcctcccactgggttaatttgccggatttcacttcattgatgtggtaaatcggacgaccatcttcattttcaatgatatatccgcaagtagccagaccggcttcgtttgtccggataagttgataaagagtggctatcatatccgtttctatccagtcgtcgctatccatgaaagctatatattctccttttgcggtttccagtccttggtttcgtgcatggctgactccttggttcagagtgtgtattacctgtattcgttggtctttgcaggcgtattcgtcacatattttcccgcttccgtccgtacttccgtcattaaccagcagtacctcaatgtctgtcagtgtctggtttaagacgctgctgatacacaaaggcaggaatttttctgtattgtatatagggatgatgacagaaaccaacggcataacttataattctgtgagtttataaataagatcattctttagctggcgaagcgtataaagcaggttgctcggattttgaaatgtttcttccaagggcatgatgacgggaacatactttatctttaaccggtgccttatgcaatagacattgatcaatctttctgataaatagccgaacagacgtgcctgatccggataggcggacagttttacccgtttttctaattcaaacaatacgcggaatagccactgggagtattcgtcaaaatgtttccgtctggtgatgaacatattatatccggaataggcattgcagtgatacatgaatgtatgaaaagcttcagcatattcgggtgtgaggtgttgaatgacttctttcagtaaattgaggtcattgactagatgggaaatggcgtattgtgtagcgacgttatagggataatgacgcttgggagagaggatgatgtcataatcatttaataaaatttctaaatcaggaaatcgataagtttcttttagaaatgaatctatgttaatgaaactcctgtctggtgaaaaagctggaaaagggcgatgaaaatcaaagaagcgcctgtaatgattgagccctataatgtcacactttagatttttccaagcccaataatgggcggttagttcacaaaagtgaggattcctgtcggatatattatctcctgtgttatctagtacagggaagaatcgggcactggttagggaggcccccacctgtatagggcagaagtactcatgctgcggtagccggctgtccttatgggcacatactaatatttttatattttctcccatgtttgtgattgagggttatagcgtttgataatgcgtgcgggatttcctaccgtgacacaatagtcgggtatgttttgggtaaccacacacccggcaccgataaaacaatgtttgccgatggtgattccgggcagtacaatcacgttggctcctatgatggtatgttctccgatgtggataggggaagtggtgataccttgttcgatgatgccttgagtgatattctgataattgtgatctaatcctatcagggctacgttttgtgaaatattgaccccgttgtctatccggatgggaccgatgaccgtattgctgagtcctatccggcaatagtcgccgattacgatgtcgcctacggcattgttcaagcaggagaaatcttccactaccgaatattttcccatctggaacagatggaacggtggaaggtctttccgtacactgggataaatgactgagccctggcctttttttatgtagaaaggttgccatacgcgtatccaccaataggggcgtgtctttaccggatgcatgatgaaaccgtgtatccgttttttccattgcgggtgttgttgtaagtactcctttatattcataattctatccatgctgtgtatggttgaacttctgtgccattcctttcaagtgaaacaagttgagaagcataatgattacaaaataaggtgtctgcctgaggattctgctcatgtatttatatctcatattggacggaatggccaggtataacgcaccgttcagcaagataagcaaaatccaccactttatggaagaagttggagagaaaatgcagagaacacatgaaaagaatccgatgagcgccaacagaatgctgcggggagcgataaaggcttggagggttttcagcagataatctccgtttccgttcagtaaggctgtggggaggttacgtcccatttttaatgcaaggaaaagctgggtggctatccagcggcggcgctggttacgcaaggcatccggttgccggactttttcgtccaatgtttctagggtgtctatatattcaatgtgaatgccttgacggagcaggagttcttccagttctttgtcttcgcccgtactatgggtatggatgatgttccggacaaaccatcggaaatcgaaagccattccggagccggtaagggcagatgaaaatcccagccggatgtgtcccttgcggaagatggaattgttcatctcttcgatggcggcatccaatagggctatgtctgtattcatgtttttggctttgcggtgtgtctgtatggcttttatactctgtgaagctgctttattcagttcttgaagataacagggtgagatcagattatcggcatccagtatgaggacataatcgtatggctggtctgtgatggtctctgctgcaatgcgcagggcttttgccttggaactttccttttcatgcagttctatcaagctgatgcgttctttgcgcagtaaggcattggtttcgggacgcatgtggtcggatatgactatcaggtcgtaaagctctgccggataagtttggcgcagaacggaagtgacgcaggcgtgaatgaccgcatcctctttataggcgggaacaaggatgataaagcgttgccggacagtagtcgcgggatatttcttttgtttgaagaaatgagaggcggcagaaaacaggactatataccccacactgacggaaaggtagatatatagcgtatattccatgatatgtataatttccgatagcatggggcttttattttttctttcttaaaagcatattgaatatcatgcctgccgccagaaaggggatagctttcatggctttgttgaatttgctgtccaccaagtagtttggagtggctattgccatagtcaataagaaagtgagtaataatccccaccattttaggcaggcgctccagtggaagtatacggacaggaaactgaacaggaggaggatacctagcaggatggtgcgagggaaaatgaaccattgtagaatacggtcggcataatcaaattttccacttaaaatggcgccgggcagattaccgatattggtgaacagggaataatattgggttttaatccaagtgctatgttgggtatagaattttttctttccactattcttcaaggcatatacatgggtattatttaaatattccacatatatccgttcgcggagcagcagggattcgatgactttttcatcatcatcgtcttttaaatgacggatgttttctttgaaccaagtgaagtctattgcggttccggagccgttcagcgaagctgaaagtcccaaattgacatgtcccgcacgaagaatggaattattgatctcgtcggtgatggcattcaatatgctgacattattgggtctttcttgatagatgcgatgggtttggatggcattggagccgctggcatacgtattgttgacaacttcaagaaaattggtgtccactacattgtccgcattcatgattaaaacgatatcgtattgtccttcttgtaattgtgacatagctgctttgacagatttcatttttgaacttttcttgaacctggcttgcaacagggtgatgggatattgtgccagctgtctgtttgtttccggcttcaggtggtctgaaatgacgataatgtcatagcagtctataggatattcttgttgtagaaatgatttgacggtatagggtatgtagtcatcgtcctgataggccggtatcagaatggcgaaacggtgttttactcttgattcggaatatttgtcggtgcggttgcctgttgccgctatggcgtataccagcaggtaaaaaacagtaaaggcgcatatcgcgaaaagtaatagttctatgtatgctagaaatatcatggctgtttgtctttgtttctaagtttgaaaaatgcttttgttccctcccaatgtgctttggctatggctttctttcctttccccaaggcggtcagtatgtttttgggacatacaatcattgtctggtataagatggaaaccggaagtttccagtcaaagagattgcggtaggcatatagtaatctgtttctgctcaggtaatagtatttcaacggactttcttttccggtggagttgctgtccttgtgccatatttcgcaagcgggatcgtaccatagttcgtagccttccctattgatataggtgcaccagtccagttcctcataatatagaaaatattcttcgggcatcaggctaagcttgtctattattgtttttttcagtaacatggcggcaccatgcagataaggcgttttttgggcggggtagtggcctttatttattttccctttgcctatggctctgtttcttaaggtaatgggcgaaagttgggtgtatcctgcaaattgtatggcgtgcggttctgcataatcccggattaacggggagacacctgctatcttgtcggaggacagaaggcgttttatcaacaagggtatggcatctttgaccatacaaacatcattgttcagcaagaacaggtattttccttttgcaaggtttatacccagattgttacctccggcgaatcctaagttctgctcactgcgtacggcttgaataaaaggatatgttttttgtagcaaggcggcttcattggcagtggaaccattgtcaatgactatcatttcataactgacagagaatatagtagctgtccacgagtcgataaattcgcaggtgtcgtgaaaaccgttatagttcacggtgatgacggataggtcaggctgccggtagtccatgtatttctgagtattgtttatctaaataaggtcctaaaaaaacaaaggtgaaacaggaataaatcaagattccgttaggaaactggaaataaaccatattggcgtaagaagctaccagtatgcctgcacaaccgcataacatacctgtcagcggtcctcggatttccggatttcggattttgaataaaagaatgtaggagcccgatagaaatagaatggcatgcatacccaaaaacacacacagccccactattcccatctgtttccatacatctaccagactggagtctgaaggacagatggaaacgaaataatatttgttatggggaggaactactccgtctatggctcccatgcctatgccgaagggcatttcatccatgtaggcattcagtgctttctggttctcgaaacgagccatcatcgattgatcctctgtgtcaaagacagtacgcatacgacggatcaacttattgttctctccgatcttggtatatttcagcattcctatccctccggcaagcaggataaaggagatgatgcctattttccaacttttagacaggaacagaaagagccccagccctgcaatgggtacagctatggccgatcgggttcccgatattaacagaccataaaatcctgccatacccactattaaatagaagagtctgagaaataggttctttgtatagaaaaaagtaagcgtgaaaacagtgcaggataatcccatgctggcaccgaaaagacccgcgtcagtgaaaaatgagaaatagcggatgccggaatggataaaatgggtacgtgctccgtaggcccacaaccagcttagctcggtactgtcaaaacctttgttcttttgccaatatccttttgcggcagccagtagggtcatgataccccatagtatcaaaaagtaatggataaaagtgtagcgattgcagtgtatggatagaataatacaggtcagaatagggtataaggcccagggtcttaaaatacgaagccatgcttccatgtaaaattcaccggttataccattacctatgttgatgatacaatatagcagccagaccaatgtgatgcaggtatagacgtttagtattttcctgaaatgatgattgctttgcaactgtttcagaagaataagggccaacatgatgccgtagagcaaatcaaagatattggtaatggcaatagggatggaatgatatctgttaattcccattatcaggtaattcagcataaaggtgatggccagcagaatgacgggtttgtttatgcatataaaaataaaaagcgtggcaaaaggtatgaaccctattgcaactcctatggcaggtttcatgttgagggctgtccataggcataagcacagcccgataataaagctggctagaatttgacctgtatgggttatatttatttcttttgctatcattatctattttcctttgtattcaatggcggtcagtccgagttgaaacagcctgtattccatattcttaaagttcgtgtaaggaggtaattgtcctgtaaaatcttccactgtatttctgtctgcttgtgtcagatagaaaaggaggggtacttctttttgtttaacttgtaacaaatgttcatacagtgcctgatccgtatttttccaagtacggttggcacggacaaccagcagattgatggatgcttcatttaacaaagccggaggcagaggattgcttttcaggaccgggtgttcgattagaagaatttcatccttttccagatcgggacatagttctttcaaattgtttgcctgtacatattggctatcttcgcttagaaaatcttcatcgtatgtaatgcggcggacgtttaagccgatgttgctccaatattcctctatcaggcgggcgacatgggtctttccgtctttctcttctgtacttaacaaattgataactcgctgttcctgtgtatttagatgaggcaataaagcggtgctgagttgcttgacggccatttcgtttatggctttattataacgtctgtatcttaacttgttttctttaggatatgcgccgataactgttcctccggtgattcgttctgtacgtattttgtctctgagggtacggtccagtatttcgataatcagaaaataaccaatgatgaaaagtaaagtacccagtatggatgcaagtataatcatgcgtgcattggtgggggaggaggtcaatggaaacaggggcgggttcatgatttttaatgaagccgaagtcatttccagattcttttgtcgcaagatggctgcatttaaggcccccatggtagacatatagttgctttccacaaagccgatatgcctttctttccggcccagggtggcgccgatgggggagaaataaaggaaatcttcatttaaattctctctcattatatctcgtgcttccatttgggctttagtcttttcggcaaggactatttggtcaagccactggctgatgagtgtttcataagatacattgtttgtacttgcagcttcagcacttagtttcagggcgagattgttgatgttttgttcggcgttacttaacatgtttttttgttcctccagtttcttccggttcttttcgtccggagtgatttccatggttgagatctgagtgttcaattgggacatttgatgaagtttgtccataaactcattgttggtacggatcaatttggccacatcacctaatttatattcatagaaatcgatcaacgccttactggtagagtaattgacaagtaaatcattgtccatcatccggtaagcagcgtccatgcttgccacttgtttggtttgttctccgtagttgatgatgcggttttctatattgtactcgattaaagaatcctcggcggcagtcagcattttgcctaatctggccagttcttcttgaaagaacttgataacattgtctgtttctccatagcgtagttcatggtattgtttgacaaattcttcattcagtatctcaagtgtgttataagctattcccggatcgttggcactataagcaatctcgatcatatcgctgtttcccaacctggctacttttatatgttgtgagagtagaggtacgctgaaataagggtgggtataattgagtagttggtagataaaattattgatggacgggcgttcaaaagctaccagattatgataggttttctcttcgttttgcttgtctatcaatgcctgtaactctcgtggaatgccggaaactagctgctggtaatgtatggctgaaatataactggtgtttctttcggcatctccataaaccaaacagcgggcaagcagtttcagagatactattttcagtgtgcgttccgtcgtaatgatattcattaaattactcatgtgcacagtggcatttctggtatcggtggcatctacgttgtatccggagatgattcctgtaaagatggtggttttcacatcatacgttttttccagacttctggtaaggaaccacgctatgataccggctatacatggaaatataaccatccaccaacggatacgatagataaacttgattatatattcctcaaatccgcaactacgcgcctaatatgatacagaagcgaaaagaatctgcatcgttagtaaaaagggggcacagtgcatcgaatgtcaccataaagacatataaatgccccttaccccaccatgcgacttgaggcaatacgcaaaatcacgactataagttgtcggtgttatccaaagtcattctggaacacattggcataagcattgttgcatgaatagatattcagcacatacttccttgatgtcctgacccatttggctggcacagagatgaacttaaagacaaacgtcttgatgcggcttgttgctttgagtccgaacctcttcacgtcaagcctcgccatgatgaatttatagaagttgcgtatgagtgccataagcagaagaaacaccgtgttttctcccataaaggattttggaagcctgttccagccgaatccgttattcatatcatcgaagatgcgttccttccctccacggaggttatagaattcgacaatctctttctcggaagactcgtagtcatttgtaaggatgcagcggtaggtgtattctccttcccacaggtcgagttcgccgtctatccgcttctgtctttgaatcacaagacggtatgccttccctttccatttctcgatgagaatggaggccagctcaaactcaatgccgcccaattccactttcttccaacctctgagggcaaagatgtcattgtagagcgaactgcatcggttagcacggatatagaaggtcttgcagtgtttagcaatctcttccactatctcttcagaacacgagccgcaatcagctctgaaacggttgataataagcttgttttgttcaaacctttcaaagaacctcttcagcgtgtccttctggtggaaacggacatttgtgttgccgtcgctgttctcaatgccgacaatcaagttgccaataaccgccacgccagggcgataaccaaggaacttcttgtatgtaggcttcgcatcaaacttctcagcctctatgaactggtggtcgaagtcaacgtcatacccctcgccctctttcagctgccctgtggacaataggcaattgaggagcagtgtattcagcttgtctgccgtgttgaagtcgtaggtcttgccagtgtcggatgtgtaggaaatgttatcctgggtcagttcctttatggctctaagaatcgtgtcggcactgcatgtgcgaagtgtcggatgaagcgaaaggtggtacatcagatgagtggtgacatcctcgatgcatgagccgccacaaaaataaacgctcataagcgaacggatgatttcgctgtattgataaccatacagcctgcatctcataccgagggttgagtcgattacagatgagagtctggagtcaaattgctccattattgaaaatattcctccaaaaggagtgagtttctcggatttaattgctacctttgccatgtctgtcgggtttgatacatattttgatttgcaacactaagataggtgaaaaatctgacatggcaaattcctgagcaactttttgttgctcaggtacttaaaaagttatatttgtaatagtgttgcggaattaaggatatttaaataattccatgtttcttattcctttttgtcttttttcttactttgcctcttgttttcttcctgttcctgtatcgttgtttcttgaacgtccttttctccttgtatggtcaagatgggggtgtgggagattatttcaagggtcagcagttggtcgttaatagtagagcgtagtaaggcaaagtcttgattagcggcaaattcctgctctttagtcttggccacatcatgaatagaggtacgtctgtttctatattcctgttctgcaacagccgatgcacctttatataaagctatattttcagctgatctttgcaatgtttctatattagataaaatctgaacatataaatgagctatttgtattttaagagtttcgtatgcttcctgttttcttaactcggcaatatctacttggattcgctggcgcttgattcctccccggaggtcgaacagcttttcaaaaggaatactgatgccgcctcccacgttccacgaagtttgttctgtacctacatacctgtaaataagtggggtgttgacatccgtattgctggccacattgtctgctataccgtaagaagcacttccgccggcttggataaaccccagccagttccttttctctttcgatagtaactttttctgtaacagtttctctttctctaaaatctgtaagcttggagtgctgcgtgcattctcataaaggacacttaacggaggcagctttatcttcgcataatccacattcatattccccaatatatcatcttgtgtcacaagaggttgctgtaccggttgtgtttgttgttcttcctgttgtgcgcttaagtgatggatagaacaatacatacagatgacaaaaagacatactttatccatataataaatcccctttttattcctaaaacaaattatttaaacatctcctttttggacaaaagctgtcaaagtcttgaacaggattttcatatccagaaaaaaggagaattctttaccgtatttcaaatctaattctttgcgttctttagcggataattttccggcatccccccgcttttctacctgccacaaaccggtcagcccggcaggcgccatgaagcgttcgatactttcatcgtttgtcaggcgttcggcttcatagagtggaagaggacggttacccaccacagacatatcgcctttcaatatgttgaccagttgaggtagctcatccaggctgtattttcgtaaaacgcgtcctactttggtgactcgcgggtctttttctatttttatgaaaggactttcatccagtgcgttttgtttggaaatgaactcttcttccggaatgatgaagtcatcggaaaccagcattccgccattatctataacaccgtcatctccaaacatcagtcctcctaattcttccatcgagaaatctttggcaatctccggagtgccttccggctggtactggttctgaccggcaaggtctttcagctttttatcggcgtccgtatacatggaacggaatttcaggaaattaaaaatggtataattcgttcctacccgtttggatttgtaaataacaggtcctttgctttccatacgtatggctatggcaatcagcagaaagactggggacaggaagactaacgctgcaccggagaaaaggatatcgaagcagcgcttccattggggaaggataaaatgcctcacgtcttttttcttccggttatgtgcatatagcagttcctgccgtttattgatgatgtctattttctgccttaaccgggcggtggtgatgttcaaactgacggtatcgtttattccgctgttcagatagactttgctggcttcgggagtcagtctgtccgtaatgagtacgacatatgcctgatagaactttttcctgaaagcaccgatctgttcaatatctccgttcatctccccttgttcgtgaaggacaatgatgttctcacgtactttcagtctgatacaaattgtaatggcatcctggtagttttgggcataaatcatctggacattttcgagcttgctgaatttgcgcaaaaaatccttgttctttcctatataaagcagaaaggtcatgctgatttactcaataattttcttaattcttacttttaactccatgggattgaaaggtttgacaatatagtcttccgcgccttcttgtaacaggcggatgcgctctgtggtactgtcttcgctgcttagcataatcaccggaatgtgtttgaatagctgattggattttatccattccagaaactcgtctccacgcatttcgggcatacggatatctgatataatcaaatctggtatgttaccttcctgaagccattttactccttcgatgccattcggtaaccaaatacaatcataatcactggccagatagattgaaaggacttttgcaattgctattttgtcgtccaagaccaaaattttctttctcatagagtaatctttagattttaatgggcaaaagtaaagaaaattattgtgaataaacaactttattctattaattttttggcgtaaagattgcttttttttaaccaaacgtctgaaataggagattgaatggaataaaagtcctttggaaaaaggaaaaaaagaagacgagacaattcctgtatattatatattgtagtgtatatgataaggttaagatatcatattgtataatagatgatatttattatattgaaaaatagtgttttagaacataataaaaataaatatattgttttgtataattcaaaaaatagtatttatctttgctgccggaaatgataaaagccatattactatgtcggaaataaaccagacgattaatttacatgtatctgtggactgtgtgctgattggttttgatggagagcagttccgtgtcctgttggtaaggcaggtggggaaacagtccgaagacggatataataacatgaaattgccgggtagccttatctatgacgatgaggatctggatgaggcggccaagcgagtgttgaatgagctgacgggactgaagaatgtgaagctgacacagtttaaggcgtatggatcgaaaaaccgtacccgtaaccctaaggatgtgttgtggctggaacgttttcatcgtttggacgagaagaaaatagaccgcattgtgactatcgcttatctgacattggtgaagattgacagacggttcgaacagctgtctgataaatacgatgcttgctggacgcctgtgacggaggtgaaaagcctggcgttcgatcatttccagattttgcaggatgcattggtacatatacgccattatgtggaatatgccccttccgtaatgttcgacttgcttccccggaagtttacggcagcccagttgcggactgtctatcagttgatttatgataaggtgtttgatgtaaggaacttccataagaagatagcgttgatgccatatgtagtacctttggaggaaaaacaggtaggcgtatgccacagggcggcacgcttctataagttcgatcgttcaatatataataagtcgggaacgaagtgataacagacagataactttagccttgttgtgattgctgtgagaatactccgcctggtcgtttcggggaatcggtacatgctttgggattcttcaccggcctttccttggaaggataatgctgataagcatcgggacagagactattatttttaaattcttaaattttcaatttaaatgtacctattaggttatgatattggcagttcgtcggtaaaggcgagtttggtaaatgcagaaaccggaaagtgtgtctcttctgcattcttccctaaaacagaggctgctattatggctgcccgccccggatgggctgagcaggatccgcaaaaatggtgggaaaatctgaaattgtcaactcaggctgtcatggccgggagtgggatcggtccggatggaattgccgctatcggtatctcttatcagatgcacggactggtttgtgtggataaagggcaaaatgtattacgtccggctattatatggtgtgattcacgggcggttccatacgggcagaaagcgtttgaggcattgggggaaacgcaatgtctttctcatctgctgaactctccggggaattttaccgcttccaaactggcatggattaaagagaatgagcctgctgtgtacgaacgtatttataaaataatgctgcccggcgattatatcgctatgaaactgacaggggatatttgtaccacggtgtccggtttgtccgaagggatgttctgggattttcaggcaaatgatgtcgcgggcttcctgatggattattatggattcgaccgttcgctgatagctgatatcaaaccgacttttggcgagcaggggcgtgtaaatgcatgggctgccaaagaattgggcctgaaagagggaattcctgtaacctatcgcgccggagatcagcctaataatgctttgtcgctcaatgtgttcaatccgggagagattgcttctacggcaggaacatcgggagtggtatatggcgtgaacggtgaggtaaattatgatccgaaatcccgggtgaatacttttgcccatgtaaatcataccgctgagcagacccgtctgggagtgttgttgtgtatcaatggtaccggtatattgaattcgtgggtgaaacgtaatgtggctcccggaggtatttcttacagtgatatgaacaggctagcggcacaggctcctgtcggcagtgccggagtaagtattcttccttttggtaacggggcggagcgtatgctggaaaataaagagacaggatgctctatatgtggagttaattttaacttgcatggaaagcagcatattgttcgtgccgcacaggaagggatcgtgttctcgtttaaatacggtattgatatcatggagcagatgggtatccctgtacagaagattcatgccggacatgccaatatgtttctcagtcctattttccgcgaaacattggcgggagtgacaggggctgtaatcgaactgtatgacacggatggatcggtgggcgccgccaagggggccggcataggcgcgggtgtttataaagataacaacgaggcatttgccacattggaaaaattggaggtgatagagcctgatgtggcacagcgcactgcttatgatgatgcgtatgcccgctggaaatctaatctggagagagcgatggctgccttttaaggaccttcggataaagaaatggctatccgcttgcgtgttgaaaaaagatagtagataaattagaacaagttattaaaataagtaaagaattatggctacaaaagagtattttcccggtataggaaagattaaatttgaaggtaaggaaagtaagaacccgatggcgttccgttattatgatgctgaaaaggtaataaacggcaagaagatgaaagactggttgaagtttgctatggcatggtggcatactttgtgtgccgagggcggtgaccagtttggcggcggaacaaagaaattcccttggaacggcgatgccgataaggtgcaggctgccaagaataagatggatgccggctttgaattcatgcagaaaatgggaatcgaatattattgtttccatgatgtggacttgtgtgaggaagccgatacaatcgaggaatatgaagcgaatctgaaagagatagttgcttatgccaaacagaaacaggctgaaaccggaatcaaattgttatggggcacggcaaatgtttttggtcatgcacgctatatgaacggtgctgctacaaaccccgaatttgatgtggttgcccgcgctgctgtccaaataaagaacgctattgacgctaccatcgaactgggtggctccaattacgtgttctggggtggacgtgaagggtatatgtctttattgaatacagatcagaagcgtgagaaagaacatctggctcagatgttgaccatcgctcgcgattatgcccggagcaaaggatttacaggtactttcctgattgagcccaaaccgatggagccgactaagcatcaatatgatgtggataccgaaactgtggtagggttcttgaaaactcacggactggacaaggatttcaaggtgaacattgaagtgaatcatgctacgttggctggtcatacatttgaacatgaactggctgttgcggtagataacggaatgttgggatctattgacgctaaccgtggcgattatcagaacggatgggatacagaccagttccctatcgacaattacgaactgacccaggccatgatgcagattatccgcaacggcggtttgggtaatggcggtaccaacttcgatgccaagacacgtcgtaactctactgatctggaagatatctttatcgcccatattgcaggtatggatgctatggcgcgtgcattggaaagtgctgctgctttgcttaatgaatctccttactgcaagatgttgtcagaccgttatgcttcattcgacagtggcaaaggtaaagaatttgaagaaggcaagctgacactggaagatgtagtggcttatgctaagcagaatggtgagcccaagcaagtaagcggtaaacaggaattgtacgaagccatcgtcaatatgtattgctgatccggccgggcggtattgcacaagttttacccttgcagaccttttttaaatgaggagggctgtgcaatgaagtctgaatgaattctgctaacggattattaaagaataaacggctgtacaccgtcaggtggcagccgtttttatatttgttagagggatattttatgaaataatactcgcctatatcgaaaataatatctacctttgcggctgctaaattactaagtttattgaatttatatgataaaaaaactattatccgtactggtcttagtttttgccctctcgggttctgtgcttgcacagcaatctatgagtgaccaacaggtgttggaatatgtgaagacgggcatgcaacaaggaaaagaccaacgtcagattgctacagagttagcccgtagaggagtgacacaagaacaggctaagcgtgtaaagaaactttatgaacagcaaaatgggtctgctgataaagatgcaaatgcaacgatgcaaaatcggaaccgtttgcgtgaaaagacaaagactcaggaagatatctacgtaacagagaattttactttcgaccaacgttcagctgcggacagagtggtagggaagaactcgttggacagtgtttctgccaatcgctattacgaggggatgggcatgggcgatatggaagaaatgcagaaggataaggtgtatggacgggacatttttgaaaccagaaaccttacattcgagccgagtgtgaatctggctactcctcctaattatcgtctggggccgggtgatgaggtaatcattgatatctggggtacaaaccaggctaccatccgcgataatgtatctccggacggatctatcacgatccccgatttgggattaatttatctgaacggtatgactattgccgaagccaaccaatatttgcgtaaagaactgaataagatttatgcagggcttgataatgaacagaacccgtcctcacaaatcaaggttactttgggaaacagccggactatccaggtgaatgtgatgggagaagtgttccaaccgggaacttatgcattgtcttctttctctaccgtgtttcatgcactgtaccgtgccggtggtgtgagcgatatcggtagtttgcgtaatatacaagtagtgcgcggaggacagaagatcgctaccgtagatgtgtacgattttattatgaaaggtaaaatcaatgatgatatccgtctgcaggaaggcgatgtgatcattgttcctccatacgaggcgttggttagcatagagggtaatgtgaaacgccccatgaaatacgagatgaaaaacaacgaaagtgttgccacattgttgaagtatgccggtggattctcgggggatgcctatacccgttctctccgcatgattcgtcaaaatggaaaggagtatcagatttatacgattgatgatattgattattccgtatttcaggtaaaagatggtgatgcgctgactgctgaagctattctggatcgttttgagaataaacttgaaatcaagggtgctgtctatcgtccgggcatttatcagttcggaggaactttgaatacagtccgccaactggtggaaaaggctgaaggtcttatgggtgatgcctttacaggacgtgcagtgttgcatcgcgagcgtgagaatttgaagaaagaggttattcaagtagatataaaaggtatcatggccggtactgcacccgatgtacctttacagcgtaatgatgtgctttatattcccagtattcatgacttggaggatgtgggaactatcatggtgtatggtgaggttgcccgtccgggtgagttcgcttttgccgacaatacgactttggaggatattataatccaggctggcgggttgaaagaatcggcttctaccgttcgtgtggatgtttcccgccgtatcaaggatagcaaaggtacggaagcggtttccaccataggacaaatgtactcgttttctctgaaagacggttttgtgatagacggagaaccgggttttgtgttgcaaccgtacgatcaagtatatgtgcgtaagagtcctgcttatcaggaacaggtgaatgtacaagtgaccggtgaggttttatatgaaggtgattatgcgctgacagagaagagtgaacgtctttccgatttgatcaagaaggcaggtggagtgactccgtttgcttatatcaaaggggcccgtttaagccgtcgtatcaatgacgatgaacgcaaacgtatggaaacggttctggatatggccaagacaggaaaggactccattgatgtcaaccggctggacttgggagatatctattatgtgggtatcgatctggaaagagcgatgcttaaacccggctccagtgcggatatcgtattgcgtgagggggatgtgattgaaattcctgaatacaacaatacggtacgtatcagtggggctgtgatgtatcccaataccgtttcatttgaagatggcaagacgttgaaatattatatcgagcaggccggaggttacggtttccgtgcgaagaagagcaaggcgtatattgtatatatgaacggtcaggtgaagagagcgaagaaaggtagccgtgagctgatccagccgggatgtgaggtgattgttccggtgaaggaaaagagcaactggtctttgcagaacaccttgtccatagcaaccaccagtgcgtcattggcgactatgattgcatctattgctaatatcttaaaatagaaacagtatggcggaagataagaattatacgaataataaggaaaggccacgggaagacgaggagttggaaattgatttgatggagtatgtccgtaagttgtgggctgcccgaaaggtgctgttgaaggctgccggaataggtgctattgtaggggtgattattgctctgagtattcccaaacaatatacggtggaagtgacattgtctcccgaatccggcaaaagcggcggggggagcctgtcgggaatggctgccatgctggggatcggcggcatgagtctgggcagtgaggcggatgcgttgaacgtatctcttttcccggatatagtagcgtctactcctttcattctggaactgtttaatgcacatgtcaccacgttggacggtgaggtggatactacttttgtagcttatcttgatgagcagaaagctccgtggtggggtgctgtgatgggattgcccggggcggctataggtggggtgaaatctctcttctccgataaggaagaggaagaagggaataagctggatcctttccatctgacagaagatcaggcgaagaaagtggaagccatgcgtaaggctattactgctgatgtggataagaaaaccggcatcaccacagtgacggtgactttgcaggacccgatggttacggccgccattacagatacggtagtggtgaaacttcaagagtatatcacagcgtacagggtctctaaagcccagcaggattgtgcttatctggaacaattgtataaggaacgccagcaggagtattatgtagcccagcagaattatgccaattacatggatgctaacaagggggttgttcttcaaagtgctttgacggagagagaacgattgcagaatgatatgaatctggcatatcaggtgtatagccaggtggctacccaattgcaggtggcacgggctaaagtacaggaggccaaacctgtatttgccgttgtggaacctgccagtgtgccgttgctgccttcgggaaccagcaagaaggtgattcttgtcggatttattttcctggcagtggcgggcgcttctgcatggatcttgttcggacgtgaattctttgaaaatctgaaggcaggacttaatgctcctcaggaggggatggagaagaagtgatataaagatattgacctataaaaacagggtgtatctctcataggagatacaccctgtttttataggtcaatcttcgaaaatgttgtcctgaacgttacgatagtcctgtgtgcagttttcggtttttttaatttcactggcaaaaaccaaacaaacgcagaatcaaaactgcctttaatataaactttgattaaagtcgaaatccgtttgatagtctttcaatctcggatgtttcttgtccttgtcggacaaaataaccttgtcggccggaagtcgccagtctatgcctagatcggggtcgtcccatgcgattcctccttcgctttgcggagcataataatggtcacatttgtattggaacaacacttcgtcacttagtaccgcaaagccgtgtgcgaatccgcgggggataaaaaactgccggtgattctctccagtcaattctacagctacatgctttccaaaagtgggagaacctttccggatatctacagccacatccagtactgctcccttgattacacgcaccagtttgctttgtgtgaaaggaggtttctggaaatgcaggccgcgtaatacaccataagtggagaaactctcattatcctgtacaaatgtagtcctgcatactttttcttcaaattcacgttccgagaagctttcaaagaaataccctcttgcatcattaaaaatacggggttccaaaatgaaaaccccgtctattgctgtttttataacttccattattctaatcccagttcttttataactttcagtaaatattgtccgtattggtttttaagcatcggctgagccagttcctgcatcttttccggggtaatccagccttttctcaaagctatgccctcaaggcacgccactttcagcccctggcgtttttcaatgacttcgatgtaggtacttgcctcggccagcgagtcgtgagtaccggtatccagccatgcgaaacctctgcccaatgtttgtactttcaattccttgtcctgaagaaattgctggtttacggtggtgatttccagttctccccgtgccgaaggcttgatattcttggctacttccactaccttgttggggtagaaatagagtcccaccacggcatagttggacttaggttgggcaggtttttcttcaatagagagacaattgccatccttgtcgaattccgctacgccatatctttcgggatcactgacccaatagccgaataccgttgctttcttgtcctcttcggcagcacgtacggattctctcaacatggcggacagaccgttgccgtggaatatgttatcacccagtacaaggcagacggaatcatttccgatgaatttctcgccgatgatgaaggcctgagccagtccgtcgggcgaaggctgttccgcatattcaaagcgtactccgaaatcgcttccgtctcctaacagtcttttgaagctcggtaagtcgtatggggttgagataatgagtatttcccgtatgctggccagcataagtaccgatataggataataaatcatgggtttgtcgaagacagggagcaactgtttggatactcctttggtaataggatagaggcgcgtgcccgaacctccggctagtacaatacctttcatatctttttattttttataatgttcctacgatttgaattaataggcgtttttctcgccccggaacatgttggttactgtttttatcatgatgcggatgtcgagcaggaaagtccagttctcaatataccacaggtctcttcttaccctgccttccatttgggaaagttctttggtttctccccgatagccggtgacttgcgcccatccggtgattccgggtttgacaaggtggcgcatcatgtatttgttaatcagttgggaatattcctctgtatgtttcagcatatggggtctgggacctacaatagacatttctcctttgaaaacattaatgaattgcggcagttcgtccagattgctctttcgcaggaagttgccgaacttggtcttgcggggatcattcttggtagcctgcaatgaatcggacaatgcattcactttcatggaacggaacttatagcatttaaaaattttcccgttttccccgtttctctcctgtttgaagaaaatgggaccaggtgatgaaattttaataataagacctacaaataggtatataaatggaaaaattgtaagtaaaaacagagaggaaaatgtcaaatcaaataaccgttttgccagtctgtttaccgggttctgcaacggttcggtacggatggacaatacaggaacttcacccaataattccagttgcagctgacgctttatgtaattacgtacatgaggtacgctatagaagcggatcagattgttctcgcaatagttcatgatggccagaatatcatcctttctgctggatggcagaccgcagtacagttcgtgcacggtgttatgagacaaccattcaaataattggtttacaggacctttaaagggaatccctttggggtaattagagtccttctcatcatagaaaatgcctaaaaccctgtatccgtaagtcaaatcgttcaacgtatggtatagctccaccatattgtccccgtcacctatcagtacagtggcgtgcaggttcctgccactgcggcggaacattttcacaaagaaccgcaatgtcagccgccatcctatagctaaaggtatgaaagacagatagaaaacaagcagatagatgcgtgagaagttatctactttaataatggccagcaccgtgaggaagatgactacatgcaagctgattgttcctaacagacggcctacaatctgttccggacgcactatgcggttgtgcagtatgaccccaaagatggatatgcatggaatatagcacaggttggaagtcagcaggtaggttttcaatgaaatatgggctatggcctgtgaatctattcctttcagaataaaaaacacaagtatcatagaaaggttcaacaaggcaaaatcacctaatatcgctactagtttaattatatcagagttttcagttgtcggttgtttcatgacaaaaaaaatgttagtcgtatgcaaatatagaacatataaattaaaacgcaatactttttttaaaaaataatacttatctttgcggtcatacaacgtaaaaaatgaatcatatgaacatcaagaataatcacctcgttataatggccggaggtgttggaagccgtttctggccgatgagtactcctgattatcctaagcaatttattgatgtactgggttgcggccgtacattgatccaacttacggctgaccgtttccaggggatctgtcctccggaaaatatttgggtggtgacatcagagaagtatgcggacactgtaaaggagcagttgcccgatattgctgatgatcatatcttgcgtgagccttgccgtcgcaatacggctccttgtatagcatacgtcagttggaaaataaaggcacgtaatcctaaggccaatatggtggtgacccccagcgaccacattgtgatgaatattgcggagtttcagcgggtgattaattcggcgatgaattttacggccgattcggacgctatccttaccctgggcatgaaacctactcgtcctgagacgggctacggttacattgaagctgatctcagtgtaccttctaccgccaataaggaagtattccgggtgtattcttttaaagagaaacctgatctggaaacagcccggcgctatattcaaaaaaataatttcttctggaatgccggtatttttgtgtggaatgtaaatacggtggtgaatgccctgcgcgtatatcagcctgccatttcgaaggtgttcgagcgtttgcttccttattattatacggacaaggagcaggaaatgattaaccagaatttccctttgtgcgagaacatttcggtggattatgccattatggagaaggcggatgagatttttgtccttcctgccagctttggatggagtgatttgggtacttggggatcgttgcacgagaatttgccgaaagatgcccataataatacgcagataggtgagaatataaagttgtatgaaacccgtaactgtgtgattcacactacacaggaaaagagggtggtggtacagggactggacggatatatcgttgctgagaagaataacacattgttgatctgccggttgagcgaggaacagcgcatcaaagaattctcggcggagtaagtattctttcttgtatatattttatttctgcatacatggagtgtatgctgtctgttatctgccgttctgtttggtcattttgtcctttgtcatgccgaaaggcagatagcggtagatagctatgtgatatgaactaacttagaaggcctgcatgaggccatttacaataaacgaaatgaaaaaagttgctttaatttcaggtattacaggtcaggacggttcattcctggcagagtttttgattgaaaagggatatgaggttcacggtattctgcgccgttcttcttcattcaacacaggtcgtatagaacatctctatctggacgagtgggttcgtgatatgcaaaagacccgtctggtgaacctgcattggggggatatgaccgacagtagttcgctgatacgtatcattcaggctgtacagcccgatgaaatctataatctggctgctcagagccatgtgaaagtaagtttcgatgtgcccgagtacactgcggaagcggatgcggtaggcacgctgcgtatgttggaagctgtccggatcctgggtttggaaaaaaagaccaagatttatcaggcatctacctccgagttgttcggactggtgcaggaagtccctcagaaggaaacgactcctttctatccccgttctccgtatggggtggccaagcagtatggtttctggattaccaagaattatcgtgaaagttacggtatgtttgccgtgaacggcatcctgttcaaccatgagagcgaacgtcgtggtgaaaactttgtaacacgcaagattactttggctgccgcacgtatagcccagggatatcaggacaaactgtatctgggaaatctggattctttgcgtgactggggctatgccaaagattatgtggagtgtatgtggatgattcttcagcacgatactcccgaagattttgttattgcgaccggcgagtatcatacggtgcgcgagttctgtaccttggccttcaaggaagtgggcattgagttgcgctgggaaggcaaaggggtggatgaaagaggcatcgatgtggcgacgggcaaggaactggttgccgtcgatcctaagtatttccgtcctgccgaagtggagcagttgctgggtgatcccactaaagccaaaaccttattgggctggaatccccgtaagacttctttccccgaactggtgaaaatcatggtgaagcatgatatgaagttcgtgaagaaactatatttaaaggctcaaatagcggaataatggaaaaaacagccaagatatatgtagcaggacaccacggactggtgggttctgctatatggaataatttgcagcaaaaaggatataccaatctggtaggccgttctcacaaagaactggatctgctggacgggcaggctgtgaaggagttctttgatgaagagcagccccggtatgtcattttagcggcggcacatgtgggcggtatcatggcgaacagtctttaccgtgccgattttatttatcagaacttgcagattcagcagaatgtgataggagagagcttccgtcacaatgtaaagaaactcttgtttttgggaagcacttgcatttaccctcgtgatgccggacaacccatgaaggaagaggtgttgctgacttcaccgttggagtacaccaacgaaccatacgctattgcgaagattgcgggattgaagatgtgcgaaagctttaacctgcaatatggaaccaattacatagccgtgatgcccacgaacctttacggtcccaatgataatttccatttggagaacagccatgtgctgcctgccatgattcgtaagattcatttgggaaaatgcctgaatgaaggagattgggatgcggtgcgtaaagatatgaatctccgccctgtggagggagtaagcggtttgaatacggatgaggaaattctggctgtattgaaaaaatacggcatctccggacaggaagtgaccttatggggtacaggcaagccgttgcgtgaattcttatggagtgaggaaatggccgatgccagtgtctatatcatggagcatgtggactttaaggatacatacacacccggttccaaggatatccgtaactgccatatcaatatcggtacgggaaaagaaatcaccatcgctcaattggcggataagattgtcaaagaagtgggctatcaaggcaaactgacttttgacgctacgaagcccgacggcactatgcgcaagctgacggatgtaagcaaattgcatagtctgggatggcagcataagattgatatagaagagggagtacaccgaatgtatcaatggtatttgtcttagaagatgaagatgcaagatgatagatctttcgggtgtaagattatagatcgtttgtatgcaagatgatagatctttccggcataacatataaaagtttcgggcataacttcttgaagttatgcccgaaaccaccaaaacctatgcagacagattgacaaaatcttctgccgttttctttattccttcgggagctttttattttactgctttttattttactgcttttaatgcagcttcataatccggttcctgggttatttcgggaacaagttcggtataaaccacttttccttccgggtcaaccactactaccgaacgtgccaataatcctgccaaaggaccgtcggtcatcagaacaccatatttttcagcaaaatcggaagtatagcgataatcagacaaaggaataacgttactgatcccttcggtggtgcagaagcggccctgggcgaatggcaggtctttagagatagccaacactaccgtattgggctggtttgcagccaactgattgaacttgcgtacggaagtagcgcatacacctgtatccagactgggaaaaatgttcagaatcaggtacttgcctttaccatcctttaatgtataattgcttaagtctccttttaccaatgtaaattccggagctgaagttcctacttttacaaattctccggccaatgtcaccggtgctcctttaaatgctgtttttgccataattttattatattttagttcgatactgtaatgataacaaatttaaatggaaaaaagttcattcttttttattttcttcctttgtaaatcaagaaacctaccactaaaacaccgatagcaatgaagcaatatcctaactcgtgactgtattcggttacggtactcaataactgctcttcgggaaccactgattgcagatagtaaccgatagccgccagaatggcattccagatacctgctcccagcgttgtgtacagcaggaaagtggataatttcatcttggccagaccggcaggaatggagataagctggcggacggcaggaataagacgtccgataaaggtggagagtgccccgtgcttgtcaaagtagtgttccgcgttctgaaccttggcttcatcaatcagacacatgtgcccgaagcggctgttcgcgaatttataaaccagcggacggcctacgaaataggctatgtaataattgatgagagcgccgatattggctccgattgtcgcaaatataactaccagaaatacattcaggtcactgttgcctccggctgccttgtaagcggcaggaggcactaccacttccgaggggaaggggataaaagagctttcgatggccattaataacgtaattgtccaataattcaggtggtccagacaccattgaataaatgcaactgattccataaaataattataaataattgtttaagtttagcttgcctttgctgatatcgtccttgattacgcgtatcgcttcgttgaataactggtcgggaaactgtgcgttttcatcaactcccagagctgcatacgtatcaggaagttctttattgattttagccagatagtgtatgaacggacctggttgctgtaaataaagatagccataaatcagaaagaaataagtgctatgggcgttgtgggggaattctttgtttatttgctcaaaataccggttggcatattcaaagagatgttcatcgaagtatttggatccgattttgaacaaaatatccatccgttcctctttcggggtgaattccagggcgaggttgaattgttcctccgccttgtcgatattattctttctttcctcctcgctgatgtccttgctgcctgccattatcgtgaaaaactgtccggcatagatacgtgtttccgcatcgttcccgttctgcttcagcacttggtccagatacatatatccctcttcaggatgtcccagggctacatgacagagggctgcgatactatatatatcggttagctcgaatgcagttatctcctgtttctgttttagcagcttttgtgtatacttcatggcggtttcgtaatccttcatctcgaagtggagaccagccaatgccatataaacgggaggtttcttctctgtcgccttttccagacggagataatagttgatagattccttgatatttgctgtctggctgtaaaggaatgctttcaaggtcaatgtctctgtgttgttttcatcaatggctaatgcgaaatcaaaagcttcgtgcgccttttcgtattgctcttgttgcagatagcatttacccagttcgttccaatgctgaacggaatagggaaactcgttcagagtcatgttcaggtaagggatagccaagtccggtttgttgaaagtactgtaataatcgcacagcacgtcgcgaagacgttggttggtttccggcagggtttgcatgtcgaaatgggcaaacaggcagtcgatccacttcttggcgtattctttctggttgacgtcaacgtagtccagaatgatgtctagcagcgtatccagttcatactcctcctccatggctagttgttgtaatatcttatcggcctcttccatgtgttcctcctctatcagtaggtcggcttgcaggaatctgaattcacggtcggcagggttgttgatgagctgcatcaccatttgggcttcttctttttttcctagcagcatcaaggaacgtgcccggaaaatcagggcgtctatgttatcagggtgcaattggattgcaagatttatggccttgtcagcgtctttatgtcttccttttgaggcgtaatattcggcgatatcggtcagttcatcagcttcaaaataagcgggggtatggttttccaccataccctcgtatcttgctaatgcttctttaaattccgggtcttcaaagtaagaagacatgtcatagttcataagcttgtttttatttattaattttgctccaggtatcttttaaagatacggtgcggttgaacaccagattttctggtgtagagtctttgtccacattgaaataaccgatgcgttggaactgtaagtaatccagcggtttggcatcggccagatatttctctacatagcagttggttaatacattcaacgaatcggggttgatcatttctttcatggcttccagtgcgtcgcagttctttgcttcgcggatagcggccatctcatcacgcgggttctccactttccacaggcggtcatacaggcgtacttcggcaggcagacagtgtgcacagcttacccagtggatcgtacctttgattttgcggttgctgcccggcatgcctgttttgctgtcgggatcgtattcgcaatatacctccaccacgttgccgttgtcgtctttcttgcagcctgtacatttcacgatgtatccgcttttcagacgcacttcctgtcccggagtcatacggaaatatttcttcggggcatcttccatgaagtcgtcgcgttctatccacaactcgcggctgaattcgatggtgtgtgtgcctgccgacggatcttccgggttgttgacagcttccatttcctccacctgtccttcgggatagttggtaatgatcagcttcaccggattgatgactgccgatacacgggtggcacggctgttcaagtcctcgcggacagcgctttccagcagggcgaagtcattcagggcatcgtaagtggtataacctatcttgtctacaaatttgcggatggactcgggcgagtagccgcgacggcggaaaccgcagagagtcggcatacgggggtcgtcccaaccgtttaccagatgttcttttaccagaatcagcaggttacgcttgctcatcaaggtgtagttcaagttcagtttgttgaactcatactgatgaggacggttgtcgtccagatctttaccttcttttacccagtccacgaacaggtcgtacaacggacggtggggtacgaactccagggtacacagtgaatgagttactccttcaaagtagtcgctctgtccgtgtgcgaagtcatacatagggtatgctttccaggtttcgcctgtgcggtggtgcggagtctttaccacacgataaataatagggtcgcggaagtgcatgttggggcttgccatgtctattttggcgcggagcaccattttgccttcttctatttcaccgctgttcattttgttgaacagttccagactttcctcgatgggacggttgcggtaagggctctcggttccgggttgggtgggagttcccttctgtgccgcgatttgttcggagttctgttcgtctatataagcctttccttcctttatcagattgacggcgaaatcccataattgctggaagtagtcggatgcataatattcgtttccccactggaatccgagccattggatgtcccccttgatggcttccacgtattccatatcttctttggtcgggttggtgtcgtcaaaacgcaggttacatacgccaccatagcgtgcagctatcccgaaatccagacagatggctttggcatgaccgatgtgcaggtagccgttcggctcgggcggaaagcgggtttgtactttccctccgtttttaccttctttcaggtcgttctcaactgcctgttcaatgaagttcagacttttcttctctgtagcttctgtagcgttcatttcagtcattgtgatatcaattttacacttttgctgcaaaagtacgcattctttttgggatatcctttatttcacaggaatatatccaccgttttttataatattttgcccctcgggtgacaggatgtagtcaatgaacggggtcactttttccttattggctacattgtaatagtaataaagagggcgtactacggggtaaagtttcttctttccgttttcaaggctgggcagtacataatgcttgccgtcatcgtaggaaacggcaatggctttcacccggggagacaagtaggccagtcccacatagccgatagcgcctttggtctggcttacagactggatcacggctccggtggcgggcatggacaagctgctgctcatgtagttcttgttcttcagggcgctttctttgaaaaattcgtaagttcccgaagaggtttcgcgagaatagacaatgattttcatatcgggtccccccagctgtttccaattggttatcttgccgcggaatatggcttccagttgctggcgtgtcagttggctgacagggttggacgggtttacaatgacggccagggcgtcatacgctataattacctcctccacttcctgtttggcggctttcagtttcatcttttcgctgaatttgatgggacgggaagccatagcgatatctgttgtgttgtccatcagggcggaaatccccactccggttcctccgccggtgacggttacccgtcggtcgggatcatctttcatgaaaatctcggctgtttcttgtgatacgggcaacaccgtgtcactaccttttatgcgttgcgcggtaatattcagactacaagccaatagaataaaaagaaatagagcttttaattgattcataagttcttatattaattcgtgtgcaaaagaaacgttttcttgtgtcatttgttttactggtgtgttacgattctgttacgggtagtattcgccggcaagggtggattgaatctgttcctgcgggaaaatggtaataagatcaggtttttctttgtctgtaacaagtttgtaatataattgtagcaaatacttcaagcttctttcatatcaccttaatataaagaggctttttttgcatcagttattaaaatagaagactaaaactgtatgaaacgagtttgggaaaagattgtagaagggatattgacttgcagcggctttataacgagcattactattttgctgattgtcgtattcttatttgcggaggctctgggactttttaataaaaaagtcatagaagaggggtatgtactggcggtgaataaagccaatccggtacaggaactgagtgcggcacaaataaaagatgtttttgacgaagagattaccaactggaaagagttgggaggaccggacgcggaggttaaagttttccggttggaggatatcacctcctatttttcggaagaagagttgggagccgagtacgagaaggctccccggtgcatcggcgagatcgttgccggtaatccaggcatcatcgcctttgttccctccaagtttatagaaaaggattttccggggcatctgctgaaagacgagtctatttcttttgacgaggtttttgccggaaaggaatggttccctacggctactcccgctcctcagttcggatttcttcctttgattacgggtacgctttgggtgagtttctttgccatcctgttcgctttgcctttcggcttgtcggtggcggtgtatatgtccgaggtagcagaccatcggacccgtagttttctgaagccggttattgaattgctcagtggtattccgtccgtggtctatgggtttttcggattgattgttatcgtaccgcttattcagaaagtatttaatctgcctgtgggcgagaccggattggccggaagtattgttttggcgatcatggcactccctactatcattaccgtaagtgaggatgcgatgcggaattgtccccgtgccatgcgcgaggccagtctggcattgggcgccactcgttggcagactatatataaggtggtgattccgttttccatttccggaatcacttcgggcgttgtcctgggcatcggacgtgccataggcgagacgatggcggtgctgatggttacaggaaatgcggctgtgatacctaccactattctggaaccgctccgtaccattccggcgactattgcagcggaactgggagaggcacccgccggcggcgcgcactatgaagctctgttcctgctgggagtggtgttgtttttcatcacgatgcttatcaactttagtgtagaatatatttcatcaagaacaaataaataatgtactaatttgccggtgtgctaatgatcatgcggcacacagcgcagccaatgggtatattgatagattgacaaatgattaattaagtatttaaaatatgaagcaagatgttttccctgcccggcaaggggcgcgtaaaagacgttcgcaatggctggcattcggtattttcaaactgctgagttatagcattgtcctcattctgttcgccattctcggttttattatatataaaggtataggagtaatcagctgggagtttctgaccacggcgcccagtgacggcatgacgggtggcggtatatggccggccattgtaggtactttttatctgatggtgggcagtgcgctgttcgcatttccggtgggagtgatgagtggcatttatatgaacgaatatgcgccgaaaggcaagctggtccgctttatccggatgatgaccaataacttgagcggtattccgtccattgtgttcggtttgtttggtatggcactgtttgtgaaatacatggggttcggcgacagtatcctggccggttctttgacgttgggattgctttgtgtacctttggtgatacgtaccaccgaagaagccttgaaggcgattcccgacagcttccgtgaagggagtctggctttgggcgcgaccaagttgcaaaccatctggcatgtaattctgcccatggggatgcccaacatcattaccggactgattctggcgttgggacgtgtgtcgggtgaaacggcgcctatcttgtttacgtgtgccgcttacttcctgccgcaactgccacacagcattctggaccagtgtatggcattgccttatcacctttatgtgatttctaccagcggaacggatatggagtcacagcttcctttggcatacggtacggcgttggtactgatccttattattttaattataaacctgttggcaaatgcactccgccggtatttttccaacaaagtaaaaacgaattaataatttgtcggtgtgccgatgggttgcgctgtgtaccgcacggacattggtacattagcacattgacaaatcagcaaattattaaaacattaagaatatgaataagatagatgcaaaacatgtaaattttttctatggtgattttcaagcactgaaagatataagcatgacgattgaagagaaagaggtggtggctttcataggcccgtccggttgtggcaagtccaccttcctccgcctgttcaaccgcatgaacgatctcattcccggctctcgtctggagggggagattttgattgacgggagaaatatatacgacaagtctgtgcaggtggatgagttgcgcaagaatgtgggaatggtattccagcgtcccaatccgtttccgaagagcattttcgagaatgtggcctatgggcttcgggtaaatggggtgaaagataatgagtttatccgccacagggtggaggaaaccttgaaaggagccgcgttgtgggatgaagtgaagaataagttgaaagagtctgcgtttgctctgtccggcggtcagcagcaacggttgtgtatagcccgtgtcatggccgtatctccttcggtgctgcttatggacgaaccggcttcggcactggaccctatctctacagccaaagtagaagagttgattcatgagctgaaaaaagaatataccatcgttattgtcactcacaacatgcagcaggccgcgcgtgtcagtgacaaaacagccttcttttatatgggcaatatggtggaatatgatgatacgaagaagatattccttaattccgcaacactattacaaatataactttttaagtacctgagcaacaaaaagttgctcaggaatttgccatgtcagatttttcacctatcttagtgttgcaaatcaaaatatgtatcaaacccgacagacatggcaaaggtagcaattaaatccgagaaactcactccttttggaggaatattttcaataatggagcaatttgactccagactctcatctgtaatcgactcaaccctcggtatgagatgcaggctgtatggttatcaatacagcgaaatcatccgttcgcttatgagcgtttatttttgtggcggctcatgcatcgaggatgtcaccactcatctgatgtaccacctttcgcttcatccgacacttcgcacatgcagtgccgacacgattcttagagccataaaggaactgacccaggataacatttcctacacatccgacactggcaagacctacgacttcaacacggcagacaagctgaatacactgctcctcaattgcctattgtccacagggcagctgaaagagggcgaggggtatgacgttgacttcgaccaccagttcatagaggctgagaagtttgatgcgaagcctacatacaagaagttccttggttatcgccctggcgtggcggttattggcaacttgattgtcggcattgagaacagcgacggcaacacaaatgtccgtttccaccagaaggacacgctgaagaggttctttgaaaggtttgaacaaaacaagcttattatcaaccgtttcagagctgattgcggctcgtgttctgaagagatagtggaagagattgctaaacactgcaagaccttctatatccgtgctaaccgatgcagttcgctctacaatgacatctttgccctcagaggttggaagaaagtggaattgggcggcattgagtttgagctggcctccattctcatcgagaaatggaaagggaaggcataccgtcttgtgattcaaagacagaagcggatagacggcgaactcgacctgtgggaaggagaatacacctaccgctgcatccttacaaatgactacgagtcttccgagaaagagattgtcgaattctataacctccgtggagggaaggaacgcatcttcgatgatatgaataacggattcggctggaacaggcttccaaaatcctttatgggagaaaacacggtgtttcttctgcttatggcactcatacgcaacttctataaattcatcatggcgaggcttgacgtgaagaggttcggactcaaagcaacaagccgcatcaagacgtttgtctttaagttcatctctgtgccagccaaatgggtcaggacatcaaggaagtatgtgctgaatatctattcatgcaacaatgcttatgccaatgtgttccagaatgactttggataacaccgacaacttatagtcgtgattttgcgtattgcctcaagtcgcatggtggggtaaggggcatttatatgtctttatggtgacattcgatgcactgtgccccctttttactaacgatgcagattcttttcgcttctgtatcatattaggcgcgtagttgcggatttgaggatatttacgaatccgggcaaagaagcgacccagaattatattacgggacgtttcggataaagcattcatcacagcgttgcacaatgggagataagataaaaatggaatttatgtaccacagctcgatgcaggcttgtttgcttttcagatgtaatgggtacggatttgcctttttattcttctgtccggaaaattaaaatcagtgtgaatctgcgcaatctgcggtgaaagaaataataataaacaaaacaagaattaagaatatggtgaaatttatagaatcagaacttgtatcactgaagaaggaagtgaacgagatgtggacattggtttacaatcagctggacagggcaggagaggccgtgctgacctttaaccgtgaccaggcacagcaagtcattgtccgtgagaaaagggtgaatgcgttcgagttgaaaattgacagtgatgtagaggacactatcgctctatacaatccggtagccattgacctgcgttttgtgctggccatgttcaaaataaacagtgatttggagcgtttgggagattttgccgaaggcatagcccgttttgtggtaagaagcgaggaaacagtgctggatagtgaactgctccacagtctgcgtatagaagagatgttgagacaagtgctcagtatgctcgaaatgaccaagaacgcgttgaatgaagaaaatctggaattagccctcaatgtattcagtaaagacaatttcctggacgaaatcaatgcggctgcccctgccgtgcttacaaaatatctggaaacacatcccgataatttcctgacttgcctggaactcggcaccgttatccgtaagctggaacgtgccggagatcatataactaatatcgctgaagaaattgttttctttatagatgcaaaggtactgaaacaccgcgataaagtggacgaacatttcttgggaaaagaaaaaactcattaaaatgctgtttcaagttaaacttttgctatctttgtatatgtaatgaggccgataaagagcattttgaataataatctgccaaaaaagacagaaatttctaaaaacatgttgtatggcatagttttttatttggctggtttaaaaaaaggctccatatttgcatcgttatcctgaaaacaatctttttaccttaaaaaaaaactaatacctattgaaaacttaaaaagggggctttgtgaaaagaccccttttttattttctatataatggctctgtcagtgttaaatttcacctatttattggtcaatatgtaagatttctgtaattattagcttatattagcaactttcttttaagttaatgcttaactttgctggctcataagaatagcggtaaaaagaatgaagacaaaatacatcaagtcgtttttactatttttgttattaggatgctgcatctcggtgtcagctcaaaatatacaaggcgttgtaactgactcattgacgaatgatcccataccatacttgtcagtcttttatgaaggaaaaggcgtaggaagcattaccgataatgatggacattataaggtcgaaacccgtaaaggctggaataaactcaccttttcggcagtggggtatgtaacaaaagtagtgaatataatccccggtgtcaccaagaacctgaatgtgaggatgaggccggacgatatcatgctggacgaagtggtggtgaagcccaaacgagagaagtactcccgtaagaataacccggctgtggaactgatgaagaaagtgattgctcataagaacaataacaagctgagtgagaatgactattatcagtacaacaagtatcagaagatcacaatgtcactgaatgatgtgacccccgaaatgctggaaaaaggcatgtataaaaagatgcctttcctgaaagaccagatcgaactttgtgaggaaaccaataaattcatccttcctatctcggtggacgagaccgcttcgcagaaaatttaccgtaaacatcccaagagtgagaagaccattatcaaagggatgagctctacgggtgtgaacgagctgtttgccacaggagatatgctgagcacggttctgaaggatgtgtttacggatgtgaatatttatgataacgatatccgtctgttgcagtatcctttcatcagtcctatttcgtccagtgatgccatttcgttttataagttttacattatggacaccacattcgtggacaaggacaagtgcttccatctcacctttgtccccaataactcgcaggatttcggtttcacgggacatctgtatgtactggccgattcatcttatacggtgaagaaatgtacgatgaatctgcccaagaaatcgggagtgaactttgtggacaatatggatattattcaggagttcgagcaattgcccaatggcgagtgggtgttgaagaccgatgacatgattgtggagatgaccttgatgaagatcatgcaaggattccagatacgaaggactacccgttattccgattatgccttcgatgagcttccgcagcaacttttcaagcgtaagggggccgagatcaaagaggcggacgccatgatgcgcggagacgatttctggaatcaataccggccggttccgcttacgcagaccgagagttctatggatatgctggtgaagcgtctggaacagatgccgggattcaaatatgtgatttttgtattgaaagcgtttattgagaactttgtggaaaccggaaccaaggacaaccccagcaaggtagatatcggtccggtaaacaccatgatctccaataactatatcgacggattgcgtttgcgtatgagcgcgcagaccacggccaacctgaatccgcatctgttcttcaagggatattatgcttacgggttcaaggaccatcgttccaagtatatgggtgaggtggaatactctttcaacaagaaggaatacctgccgcgcgagttcccgaagaactctatcacgttcagctatcagtatgatgtgatgtcgcccacggataagttcctgaagacggacaaggataatgtgttcgtttctttcaagacttctacggtggaccagatgtcctacgtgcggaatatcgccttgaagtatgagaacgagacgcagtttggtttgaagaccacggtggaagtgaaacacagcacggacgagcctaccggcggtctggcctatataacgaatgatgaccagaaaacgttggttcctgagattcagaccatggaagcctccttggccttccgttacgctccgggtgagacatttgtcaataccaagcaacgccgtataccggtttcttttgacgctccggtattcacgctgtcgcacacgaccggtttcaagggtgtgctgggcggagagtataacttcaatctgacggaagtagggttgtacaagcgtttctggttctcgtcatggggtaagattgatatgttcgtgaaaggcggtgcgcagtggaacaaagttccgttcccgttgctgattatgccggcggccaacttgtcttatatcctgcaacgcgagactttcaacttgattaataatatggagttcctgaacgaccgttacgcctctctggatgtatcgtgggatttgaacggtaagattttcaaccgtattcctttgctgaagaaactgaagtggcgtgaggcgatcggcttcaagatgctgtatggtcatttaaccgacaagaacaatccgatgaagcatccgggtgacagcgaactcttcctgttcccgacccgtgacggacgtcctaccagctttgtgatggacccgaagaccccgtacatggaatgctctgtgggtattcacaatattttcaagatattgcacatagactatgtccgccgtctgaattatctggatcatcccgatgcgaacaaatggggcgtgcggtttatggtgatgatgacgttctgatgcaaggagagctctgatggtgtgtgaaatgaagaaaccgaggtaagaacttgtatcgttcaaataaaaggtttatctttgttccagtacctaaagttggtgaaaagtatgttatgcttaaatgaatgtaaggcaaagttagttagtttcaaacaatgttttgggcatgagtttggaattaaatcaattggtatcttcggttcggttgcacgtcaagagaacagggaagatagtgatttggatattgttgtagatattgataatcctactttatccactatgtacactttgaagactgttttgacggaaatgtttcattgtgaaattgatttagtgcgtttccgttcctcactgtctccatttttgaaacagaatattgaaaaagaagccatttatgtataaaggaggacgactaaccatttgcgacaggttaacccagataaaagaatccatttacttatatacagcaatggagtaaagaaataaattgtgctgatgattttttagcctccatggataaagtgatggtgttcaatgcatgtgttatgcgccttcaagtaataggtgaacaggtgggaaagttgttgtttttacaaccatcaccgctttctgaatataaggaaattccttggttggctatttatgatatgcgcaatcttatttcgcatgaatatagtaatgtagacgagcagatagtatttactactataaagaatgaccttatagaattggataaggttattacagtcctattgaataaatatttgtaaaacttgaatcttttattgtgattacgaaatatacccatctcttattttcttatcaaaagtaagttttcctattttttaagcgcttttattgtgtaatacacaattatagtgtatctttgtgccctcaaaaagtttctaaattccttttatataaagggtaaagaaccttttttgagggtataaacatgtctataaaaagcagacagaaaagacgtcttcggacgaaagagacaacaaataaaagatttcagaaatacaaaatgaaatctgtgtaaaatactatttatcagccagttataaacactgtgctgatatggtcttccagtatcggtcagcgtggatttctgacgataaacctcatgaaaaagctattccatcagtttgataaaccgaagcgttctgtggcatctcccgaagcgttggaggctttgcggaataacaatgccgtgcgttggtatgtgttgtcgcttcccgattgccatcggggaggagtgcgcggtttgcaacgggaacaggaccgccgcatacaggcaggcgaaccttcattcggcttttttgctccttcctatcaggaagtgaagcgtatagacggcaaattcgtcaatacccagcgtcccttactcttcaactatgtgtttgtccgtgcctccgagcgtgatgttttccagctgatgcaacgttttcctgtgctcagtttcctgcctcgggtgagggaacggaagcgggagtatttcccttacctttccgatgcggcaatggagaatttgcagtgggtggcccgttcttattccaatacacttcctgtttatataccccagccggatggtttgcgcaagggcgaccggatacgcattaccgagggacggtttaagggggtggaggcgactgttgtcattcagccgggagccgggcgaaaggatgtgatggtatgtgtggagaactggatgtgggttccgctgctgcgtgtgatgccgggtgagtacgaggtaattgccctgaatgatgaggacaagcatgtatatacccgtctggacaatgactgtatgttgaatggtttgcacagtgctcttcagcgttatcacagtgcggagggggtgaatgaggaagatcgttccctggctgccagggcgttgaaagaatatggcaatctccagatggatacggatgtgatgcgttgcaagctttatgccattttgctgccggcttatactatattgggtatggaagaagaggcggcaaagctggttggcgttatgcagactatgtttcctctcgtcaaggcggagcagtcgcgtgcacttgctgtggttacactttatggttgtacggatagcagtatctattatcatttggcgcacgaggcggttgatccgtggaagaaagaggaaaagccgaaaaagagtaagcagcagctgatcaaccggttggatgattatgatcggtggttgaggcattgaaatggaaatagggtgcatgcatgagggtggtgcagtgagttaaaaagaatatttcactaggaagaatgaaaaataatttgttcttttgtatataatgatagaaaagacgattatgccgacaatgaatatttcaaattcaaaaacttcaatttcaaatatctattgggagatgttgaaagacctaagttccgacattaagttggaactgatagccaagttgtctgcttccttagttgccaaggataatacgtccgatacttcaaattggacttcagaatttgtcgggcgatgggaagatgatcgtacggcagatgaggttatcgaggatatacgtggtgcaaggacttcaaatagggagattgaattatgaaacaatatcttcttgatacttgtatctgtgtatttctattccggcagaagtttgaaatagctgaaaaattagcaggaataggtgcttcacagtgttttgtatcagaagtaaccattgcagaattgaaatatggcgcttacaaaagtaagcgtttaaaagagaatttggatctgatagatcgttttatatcaaagataaatattgtgccttttgcagaatctgtagatttctttgctcaagagaagaatcgcctccgctcattaggcactcctgtcgaagattttgatttgctgatagcttctgcagcttgttctagaaatcttatattggtgacggacaatttgaagcattttaaaaatataaaagggctgatggttgaaaattgggtggaaagatagtccttctttctgctattgcatgtgggtaatatgaatattcaagagaaaatgagagataaaggtactaagaaaatgacatgcgaagatgctttgcgtcggctggaagaagcaagaagattaaagcgtgaatatgttaaggagctggaaaagaagatgaaggaggactttaagaaacgtacaggtcaggacgctacctattttgaagtatggtaaattttaatcttgactatattaattcttattctttcattttcattgtataagtctaattatttttatgcccgttggtgttcgggatcttgaaagaaggcatgaattatgcagcgattattgtctgccttgataatctagactaacctctgtcattgtataatttaccgaaacagttttattgtttagtcagaagccggaatagtatgtagtgcaggcttttgagtaagtgaatacttattgttatctatatatattcatttctttgttttttataaaaactaaagaatatgaagttagaaccttttaactcagttcaattacatttgttgaagatgttttctatgtaaaaaaatgagcgtgctttggaagaaatacgtaaatctttgacaatctactttactcatggtattctctcactaactttttttaatacatatatacacaatcaacaatcggtttgtggattgtactattgtgactggaggtgattattatttttttgatgatatgcattttaaaggggtaagtttgatatctttggctgtctttctagatttataagggtataagtatacatatatacaagttaaataatccagcggtaaatgagaggatgtttgaatatacttctaataatggcgaactgttacgatagtctgatatttagtttttttaatattattgcactgcttttaggatgagttttgttttgtgccagaggggataaggtgtaattaaaacgtctgatgatagacattgttaatggtattaagataattatatgtatactattttagttttaaattagtgagactaatcaatcgatcacgttgcgcaatgtataattggggaataaatatatttcatttagttcatgaatactatttcagataataagcggattgccaaaaatactatttttctgtattttagaatgttgcttattatggtcgtcaccctttatacttcacgtgtctatttaaaagtattgggggaaaccgatttcggtatttataatatcgttggaggtataattgtcatgatgtcgtttattagtagtagtatgtcaatttctatacagcgctttcttaattttgaaatggggaagaacaaccaggaaaatgtgagacgggtattctcctctagtctaattatttatgctgctttttcgttgtgcatacttatggttggcgagacattaggtttgtggtttttgaatacgcagatgaatattccgtctgatcgaatgtatgctgctaattgggtgtatcatttcacattaatcggattgatcgcaaatttgtttagaataccctataatgcaatcattacagctaatgaacgaatgaatttctatgcatatttcagcgttttggaaacttttttaaaattgggaattgtctttatattattggcttggggtgatgtagataaactagtattgttgtcgatattaagtgcaatagttttcatcattattactttctgttataagatatattgtaatcaccattttatctcatcacgttttcaggctatttgggataaggatatcatgaagaaactgcttagcttctcaggatggagtttattgggaagtgctgctaatatgggaggaaaccaaggaaataatattattctgaatatattttgtggggtgggtgtaaatgcagcagtaggtgtggctacccaattaatcagtggaattaatcagttggtaagtaattttcaaatggcatttacgccacaattgataaaactctatgcttcagataatcgagaagagtttatgcaattagtgtttcgttcctctcgattctcttactatttacttttagtaatttctatacctgccatgctttgcatggagtttatattagatatttggttggatgaagtacctcaatatactgttgatttctgcagattgatattgatctattctttgctggatgccatatcagcccctctatggctatctgttcaagcagcaggaaaaattcgaaattatcagattttgatgtctgtccttattgcccttaaccttcctttgtcctattgggcattaaaagagggtatgtctccactgtcagtttgggtgattcgggtaattatcaatgcaataacttattttacacgtatagtctatttaaaggggcttatagggtttccagcttggcaatatataaaagatgtgatatgtacagtttctgtggtgactgttctatctattcctattccctatatgttaaacgggaagtttgatggttggctcaatttaggaatagtaacaatagtatcagtgttgattacacttgctatggtgtttttggggggattaagaaaagatgagaagaaatatatttatcaaatgattaaaagtaagattggaagatgaataacatatcttcattgaatgactgttatggatgtggcgtttgtgctgtagtatgtaatagaaaaattattgaaatacggctgaatgaagatggattttatgaaccgtatataacagatattagtcgatgtactgattgtggactatgtcgtgatgtttgtgcatactctcaagatggtctttcgttagttaagtgggggaacgaaaagagttatgcggcttggagcaatgattcggaagtacgtagcaaaagctcaagtggtggagtcggatttgaattaggaagaacccttattaatcgaggttatagagtttgtgcggtacactacaatattgcctcaaagcgggctgagcattatattgcagctacaatagaagaattaatgccaagtataggtagtaaatatataccaagctatacagtagatggttttcgggctcttgatcggaaagggaaatatttattgataggtactccttgtcaaattgattcttttcgtagatatattcaaaggtttaaaatagaggacaattttattttggttgattttttttgtcatggtgtaccttctatgttactttgggataagtatattaaagagattgaaaaagaaatgggtgaaattaccaatgtttcttggagaaataaattaacaggatggcatgattcgtgggcaatgtttatcgaaggggggcaatatggaaaaattgcagaaaaacttgattattataatgaacttgataaagaaaaaagaggaatttataattctagattttctcaaggtgattccttttattgtttattcttaggtgatgcttgtttaggaaaagcatgttatgataagtgtaaatataagtataataattcttcagctgacattcgtattggtgatttgtggggaaagacttatcagaataatgaggaaggtgtgagtgcagcaattgcttttacctttaaaggaaatactttattaaaagaatgtaattgcaaattgattgaacatccttttgaagtggtagctgagggccaaatgaaagaatgtcctaaacgtccatcctgttttttacatataatgtctttacttagaaatgagaatgttccacttacagaggtgttacaattattgctttcttatgaaaagcggaagcgtaatattaataggttgaagcatcctatgagtatagttgggaatgttctaaagagaatgaaaaaatatttatgcagataaaaacgataacttgccatcgagtttataattatggtgcgtcattgcaagcttatgctttgcagcattatttagaagaaaaaggtcatcatgtagaaattattgatttttggccatatgcttttcatggcagatataatttcttttatgtaaattctaggtcccgctatttctcattattacaaaggtttcctattttgaagtttttctatggacttagattcaatagaaggatgtttaaaacatacggaagaaaaagttcttttgataagtttgaaaagcaatttttacatctgacagttatgtcctatcctacttctgatgctcttaagaaagacccaccttttgcagatgtgtatatagctgggagtgaccaaatttggaatactgatatgtctaatggacatgaatctgccttttatttggattttggagataaagctatatgtagaatagcttatgctgcaagttttggtattccatcagttcctgatgaatataaaaatattatttcaaatagaattcataagttagattttgtttccgtccgtgaggcaagtggtttgaatatccttaaaaacatgggtattgaaaatgctgttcaagttttagatcctgtttttcttctttctgcagatgaatggcgcaaatgtgtgttgtatgactctaggcattatcattttatagatgataaatacattttaatatatgactttataggagattctagaattaagcaattagctattaatacagcacaaaatttaaagtgtaaattggtttcattgaatgattttaggacatatcattatgtggactacaatataaataatgctggtccgtgtgaatttctaaatttgatagaacatgcttgtttggtcattacaaattcgtttcatgcgacagctttttctgtgatttttaataaagagttttatacatttagcctttcaactcaaaatagttcgtcacgaatggaagatttttgtcatttgttgaatctaatggaacgttataatagtacccaaattgcagataataaaattagctatcatgaagtcaataggacaataaatgaacagaaatatatgtctatgagatttataaatatggggataaattttgctgaaggcttataatttgatttcatatatgaaaatattatggtttacaggtggcacgtcattatatgctaataaaaacacttataatgggggaggatgggtggcatcattgcaacaggcactaattaataatcctagtactgatgtggtgatagaggtggcttttccatggcattgcaatatgcaagacaatgtagatggagtagtctattacggtataaagaggatgttaaagccatttatctgttataatcgcaagcaaaaggctgaatatgaaagaataaaagaagtggtcgatagatctaaacctgatatcattcatgtatttggtacagagttatcttatgggatggtatctaaaatgacgaatattccagtcgtcatccatttacagggaatattgggatgttataaagaattttggcttcctgctggactttcatggataaaatattttatccatgatccgcgtaagcttatttctcagataaaccttaatcgatatatcaaacgtgaatttgaaatttttcaaaatagtcgttatttaatgggacgtacatgctgggatcgttctaatgcagctcttatggctcctcaagctacatatttttattgtagtgaaatgcttcgtccctgtatatataattcttgccgtatatggcaacctcgcaataatattcataaagtgattgtatcagtgatctctcctgctatctacaaaggaggagatgtgatattaaagactgcggaggtattaaagaaattttggggagatgattttgaatggcaagtatatggtattgatgatttggattatatgagccggttgacagacatcaaacttaatgaagtcaatgtatctgtacgaggagtcattgatgctaaacaattggttgacgtggttatgtctgctgatgtatttgtacatccttcctatatagaaaacagtccgaatacagtgtgtgaagcgcaggtgttggggattcctgttattgctactaatgtgggtggagtatcttcccttattactgatatggaagatgccatattagttccatcacatgatatatatatgatagctgctaaactgaaattgttattagagaatgtggaactttctatgtctttaggggaaaaaggacggaaaagggcattgcttcgtcattctcctaaagtaatagtaaataatatattggatatttataacaaattggtgaaaatcagatagatagaaatgtatgtgtttataacagcctctaattctttatatcgtaggtcgatggactataatgtactgatggcaaaaaagaggggaggatttgacaaagtcttggcctatgactttgaaacaatgattgatacagaattcagaaaacggaatgatactatactttcaataaaacaaggagcaggattgtggctttggaaaccttattttattcataaagcattgatagaagaatgtgctgaaggtgatatattgttttatttggatgctgcagctttttttatcagtgatgtgaggatgatagagaaagtgatggatgatgatatttatgctacttgtctcccttatattgaagctgattggacaaagagtgagacttttgatataatggatatggataaagaggtctataaaaattcttttcaatatcaagcttcattcatggcttttcgcaaatcgatgaggagcataatgtttgtggaagaatggctgaataattgttgtaatcccgatttaataaatcctgcccaaaatataggaaaacagattgaaacatttcagaatcatcgaatggatcagtcttgttttagcctattatgtaagaaatataatgtttctccgcataaagatcctacccaattcggtatttgggggtatccagaagtaagaggtgcccgttatgttgggataaaaatgaaaaatgagtatccgattgtaattgttcttcatagattgaaggatttcggattaagaaataaactgagattagtaaagagaactatgtgcttgataagtaagaatataattaaaaatataaggaggaaaagatgctaaatccacaattgaactttttaatttctgccatacatcgtggttgttgtatgtctacaaaagatatcctttcatggatgaagagaaaaaatgatgaaatttgttaccatcttcagcagattccccttcagaatttaaaggattggactgacaaaaatgataaaatatcccattctactggaaagtttttttccattcaaggtataagagtgtcaactaactatggattggttccacagtgggaccaacctataatcaatcagcctgagataggttttcttggctttatagtacaaagaaaacaaaatgtactacattttttacttcaagcaaaaatagagcctggtaatcttaatgtaatccagttgtctcctacccttcaagctacaagaagtaattacactagggtgcataaagggcgctctccactatatttggaatattttacaggtgagaagaaagttgaaatcttagttgatcaattacagtcagaacagggtgcccgtttttatcagaagcggaataggaatattattgtagaagtggatgaaaacgaagaattgcctgtatatgagaattttgtttgggcatctttagggcaaataaaagaattgcttacttatcctaatgttataaatatggatactcgtactgttatttcctgtatacaatatggtaattatagtgaaaaagatttgcagctactttccgtctttcgtttggatactaacttgggacattccgattcctttctttattctgtattgagcagtgataaccattataataccatgaattctatcattcgatggctaacatcgttaaagtttaaatatgaattgaatgttgacaagattggacttagtgaaatgaataattggatttatgatggtaatgtgatcgagcataaagataaaaagtatttttctgtgattggtgttgatgtttcaatcggtaatagagaagtgacccattgggatcagcctatggttaaggcagcacaagaaggtattatgggatttcttgtaaaaaaaattaacggaatatatcatttcctggtacaggcaaaattagaatgtggaaattttgatattgtagaacttgcccctaccgtgcaatgtcttaccggaaattaccgtaatggtcagaatgaatatagtattccgtatattgataatttcttgaatgctgatattaaagatatctggtatcaaacttatcagtcggaagaaggtggacgtttttttaaagagcagaatcttaacatcattgtagaggtgcatgatgatttttctgttgaagttgaagaaaattattgttggatgacccttaatcaaatgcttcgtttagtgaattataataacttcttaaacattgcggcacgtagtttattgtctgccgttcaattctataaataataatttatatatggataagaagattcgaattggtgttatgggatgtgctgatattgcacagcgacttgtgatacctgctattcagcaattgagtgaaaagtttaaattggtaggtgttgctagtaggacagctgataaagcaagaagttttgctgatatattcgcttgtgaatcaattgagggttataatacattggtgttacgtgatgatattgatgctgtttatataccgctaccaacagggttacataaagaatggattataaaagctttggaacatggtaaacatgtttatgcagaaaaatctattgctatgaatgggatagatgctgaagatatggtaacctgtgctaaactgaatcgtgtcgctttaatggaaggatatatgtttcagtatcataaacagcatcaggtggtaaaagacttattaaagagcaatgttattggtgaaatgagattgattcgtgcttctttcggttttcctccatttagtgactcagctaatttccgttatgacaataagataggaggaggagctttgaaagatgtggctggttatgtattgagagctgtaaattttttgaacgacaatagatttggggtaatgtcttccaatgtttgttataatgagtatggtactagtctttttggaacagcattgttgaaagatggtaagttaagtgcagaaatatcttttggttttgataatttctatcaatgtaattatgaaatatggggtagtattggtaaaatttcagttttacgtgcgttcactcctaaaccagaagataaaacaattattgttgttgaaactcaaggaaatagagaagaaattcattgtccagcgtataatcattttgtaggtgctatggaggaattttatcgtatctgcaatgacgacaatgcacgtgaaaagcattatgttgatatattatttcaaagtcgtggactagatgatattgagcgactaagcaaatagataagaaaatgagtaaatgtgcaataataggatctaaggggtatataggcaagcatttagaatattatttaaaacagaaaaagaatgatgtggtttgctatgatgtagttgaaagtgaagatgttaattatcataggtgtgacttaactgattttgaatctgttaggagaataatagatttaaaagtggattatatatttatgtttgcgggtctgacaggaacttatgtaggttttgataaggcaaatatttttgttaatgtaaatgaaatgggtttgataaacctcttaaattgcattcgagagtctaagtatcgtcctaaaataatattcccttcgactagattaatatataaaggtgccgacaaagctttgaaagaagatgatgaaaaagaaacaaagacgatttatgctgtaaataaaatagcttgtgagaatttgctttatgcttataggcaaaattttgatattccttatactatatttcgaatttgtgtaccttttggtaatatgtttagcgatgattattcatttggaactataggattttttatccgtcaagcatcaaatgatagacgtattaccctttatggggatggctctataaaacggacattcacgtctatgcatgatttgtgtaggcaaattgtagaagttggaatggaaagagtgagtgatggcgaaatttataatataggtgggcatacgtattcattgagaaatgcagctgaaattattgcaagttattataaagcagaaatttcttttatttcttggccggaacgtgatttaaaaatggaaagtggttctacttattttgattcttcgaaaatcgaaagagtaatgggcaaaattgtgtttgaaagccttgaagaacttttgaagcaatagggtatcaaatgaatgctatattagattatgcacttttacaatatagaaatccttataagtatttttttatgcttatgatgattttatggtctgcgaagactacagaactgttgaaaatagaccctgacaatacggtaatgacttgtgtatacttaatcatcatagttttttattatcagaagtattgtagaaaaggatgtttgaaaccattatatataattttaggcatatttgcgctatggtatagcgctatctgtataaaatatggtggagttcaaacgatttattttggtattcttattagtactgtcatagcttatatagcttttaatttatttaaacagtatgagttttttatttatgcagaaaaggtattagttcatttgtgtatactttcattaattatatggggagggtatgttataatgccatctttaattggagaagtaatggattctgtctctgtagtagataatgcggctaccatgcgtgccaatatatttgtagtaggtattggcaatcaaacagtggaagggttaatgattaaacgtaatattggatttacatgggaggcaggacgtttttcttgctttcttgtatttgccatgtttcttaatctatcacttcataatatgtctctttcatggagaaaaaaccgttctttttatatactaatggcaggattggtttctacactttccactacgggtattatagcctctttctctcttgtgctatattatgtgtataataaatctacggcatatagggtgacaatgattatcgctggatgcttgctgatacctgttgtctggggaatgtcttttatggggggaaaattagtttcgcttatggattatgaacaagagatacgtgatatgcagtggatgtttgacaggggagtggagtcaattactccgcaaagaataactggtgcttatttggaattacagaactttttaaatgatttttggctagggtataatgtgaatgaaaacgcattttctatgagtgcattgtttgatggtaaagaggtgtggctagccaacggtgtaatacagatatttagtatgtatggagtattcatgggactatttttttatggtttgttgattaaatcatctgctttgattataaaggtattcaataaaaaaggaacgatattgtttgcgttaatatttcttcttctcagtattagttatgaattttggactagtagtgtttttctttattgtgtctattatgctctgtttaaccattatatgcctaattatggcgttgcatatacttcagtaaaaaaggtatgaggaatccaaaggtttcaataattatagctacttataatgcagggcctactatcgagaaagctttgtgtagtgttgaaaagcaatcatttcaggattgggaatgtcttataatagatggtgtgtctcaagatgatacggtacaaaaagtaaaatatttcgcagataaagatgatcgttttagagtattttcagaaccggataaaggtgtgtttgatgcttttaataaaggatggcagaaagcacaaggtgaatggatttattatttaggtagtgatgatgagttgctaccggatggtataaaaagtttaatggagtatgcggatggtgtggatttagtttatggtgggataagaatgaaatacaggagtaagtgtacgaaagataaagaagcatctttttgggagaaagaaatgccattttcattacctgcaagtcatcaggctattataatgaagcgtgatgctatagagcgtctgggaggatacgatctgaaatataagatacttgcagattatgatttgataaatcatgccttttttgttggaatgaaagctaatcgatgttctgatatgattgctgttttttcattaggaggactcagtacggacaatatagcttcactagcagaacgttatcagattcttgttaaatatggagtaagcagaccgagggctttcattcatcgtattaaaatgacagtcttttttttgatattaaaagtaaagcattattttgattaatctgttcataaataataagcttaaatgaacatcttgtttttattgaaatcttttgaagttggaggactggaagttgtaacaacaacgcttgcaaacaaatttcaagaggaagggcataaagtagttatatggactttttctgaaggaaaaacttcacttgtgtcgcgtttagatgaaaatgtgaaacttgtgtatgggtttggttttaatttgtccaaatgtaatattaatgcattgagaacagtgcttattgatgagaaaattcaaattgttataaatcaatggggacttccttttattcctgcttatgtcttaaaaaaggcttctagaggaatacctgtaaaaataatagcagtatatcataatgatccttctactaatgggcggttaaaagatgtggagatagcaatggagaaaaaccgaaatatagttgtatatctaggattaaaaatgaaatattggttgtataggcaaataacagctgctagtatgcgatatgtttatagaaatagcgatggatatatggttttgtctcagagttttgtagaagggttcaagaagtttactgggataagaaaagcagatcggctaattgtacagaccaatcctgtaactatagatatatcggattataactatgattttgagaggaaaaaaaaggagcttgtttttgttggacgtcttgattacactcaaaaaagagtatcacgtattattgaaacatggtcattgttggaacataaacatgctgattggatattaagaattgtaggcgatggacctgagcgtgataatattgagcatatggtacagaaacttgaacttaaaaatgttcgatttgagggctttcagtatcctcgttcttattatgaaatatcatcaatattgatactaacttctgaatacgaaggatttggtctagttgtggctgaagctatgagttttggggtaatccctgttgtgttaggtagttattctgcaatatatgatttattggtagatggagaaaatggtatcattgtaccttattctcataaggatgggtttaatgcaaatgttatggctaatgcattagaaaggctgatgaatgatagaatattgtgccagaaaatgagtttgattgcatatagacatagtcgttttttttcaatagaacgtatttctaaggaatggtatgatagattgaataaaattattgaaagatgatttgttggtttcttagtgttgtccttgttatataaatataaataggcaagatagaaatattgtataatatactatagggaatgaataaaaagaaggtaggacttaatatattttaattatggatttaaaaatagatattcttactagcagaaaatatgaaaaaagaccatggtttgatttggtatatgaatgggaagatgagataaaagaacttttaaattgtaaattaatatatgaaccaacaatctttaaaaacagatattatgaattccttccattggtttatcattttatattgatgtttaaaaatggaggaaagccagttttattttttgagatgaaagctaatgtgtttcatttgtggaaaaatttgaattatttgattccttggattattgattggtatgtgaatcctaataatcaatggtggtataattggctgtataagagacataaacttatattggtttctagtaaagaagtttatgaatatttgctggctaaaaatacacggctgaatataagacatttagctttgtctttatccgatagatataaaatcacttctaatacttgttatgagaaaaaatatgatgtcatattaataggaaggcaaaatcctgtactaaaggattttttggatcaatataaaaagacgcatccggatttgataatatttattccttcaaagcaggaacttgcttcaagagatggatatttggactcaatgaaaaaaagtagaatagcattatatgcaactccagggattgatggaggagaaaagcgtactaatggcttttcacaagttacaccacgtttcttggaaatggtagcgtcagggtgtaatatcattgcaagatataagactaatgctgacactgattattatgaactggagaaattttgtcaaagtatcaatacttatgaagagtttgagaaagaaatggataaatgtaggataaaagggcctgatatgacttgagttcaagttataaatgcaacttttaaagaaaaggattaatagctgcataagtaatatttttttcagagagaaaagagagacaattccctctgttctctgctgaatggataaatgttactatctttgtttttattgtccgtccaaagaaataaaagttgtagatgagtaaacatataaccgaaaagcaaaggtatgcaatttctaagatgttgcaagttccgatgagtaaaaaagatatagctgaagctattggagttgataggagtaatatttatagagaaataaaacgcaattgcgatagtcgtagtggaaaatacaaccctgatcttgcccaaagaaaggcagataaacgtaaggttgaaaagaagcgaaaggaggtatttacacaagctatgaagaagcgtgtaaaaaagcttctacgaaaggacttgagcccagagcagatagtgggcagaagccaagtagaaaatatagctatggtatctcacgaaactatatattgttggatatggcaagataaacgacaaggtggggatcttcataaatctcttagaaggcaaggacgcaaatattcaaagcgtggttctaaaaacgcaggtagaggatttattccgaatagagtggagattgatcagcgaccttcaattgtagagcaaaaagaaagatttggtgatttagagatagatacaattattggaaagaatcacaaaggtgctattctaaccattaatgatagagcaacaagcagagtatggatacgtaagctatcagggaaagaagccatccctgtagcaaagattacagtatgggcattacgaaaagtaaaaaacttaatacacacaataacggctgataatggaaaagaatttgcaaaacacgaggatatagcacaaaaattagatattaatttctatttttgtaagccataccactcttgggagcgtggtgccaatgaaaatactaacggtcttatcaggcagtatatcccaaagggtacggactttagtgaagtaaccaacaagcgtattaaatggattgaaaacaatctaaataatagacctcgtaaaagacttggatacctcacaccaaacgaaaaatttaaacaaattattaatatgaattccgttgcatttggaacttgaattcagctgactttttactcgtcttatcttaaaaaacattatacatcaaaaagagtagaggagttgcaggtaattttaaatgaaattgattggtgatttttttgtttgataataataaattaatatgcaaaaaatagcgattataggagcaggtgtgtctggtatgagtgctgctcattttcttaaagaccgttataatgttactgtttttgagaaagaaaagactcctggaggtcttattaaatgttgtcgtattaacggaagcctttttcatacttgtggtgggcatgtctttaattcaaaacattcagatgtgttagactggttttggacaaaatttgatcgtaataaagaattctcaaaaacagatcgtaattcagccatttttatggaggaaggggacgaaattccttatccaattgaaaaccacgtatatcttttgaactctgatattcaaaagagggttattaaagatcttgttgaaatagtaagaaaagagggcgataaggctcataattttgaggagtttttaaaatcacaatttggagatactctttataagatatattttcagccttataatgaaaaagtatggaggcgtgatttaaaacaagtaccactttcatggttggaaggtaaattgcctatgccaacagtggaagaaatggtttataataatattaatcatgtgaaggaaaagttatttgttcattcaactttttggtatgaaaatatgaatggctctcaatatattgctgataagttggctgaagaacttcatatttgttatgatactgatattaaaaatattaagtatgttcataataaatggttaatagaagaggaatattttgataaagtgatattctgtgggaatattaaagatatggttaaaatagttgaaggctttgatattcgggaatatgaagacgaaatagtaaaattggaatatcatggtactacagctgtgttttgcgaaattgataagaatccatattcatggatttatcagccaagcaaacagcatgaaagtcatcgcattatttgtactggtaattttgcaaaatcaaacaatggtaattgtgttccagagggacgcataacggctactatagaatttactgatgaaatatctaaagaagatattatagataatctttcccgtatttcgcttcatcctaaatatttggctcataagtataatccttatacttaccctattcagaatgttcatactcgtgatatgattaaaaggttaaaagccgatctttttcctgtaggattctattttacaggacgttttgcggattgggaatattataatatggatattgctatgagaatggctatggatttatgtaaaaagatataagcatagatactatttgtaaaatagcttatgcaaaaaatcaaaatattaaatataggtattgataatgtttcttctctcgaattgttgaggagtttgaaacaaggtgtacttgtgactccaaatatagatcatttggtgaaattgcagaaaaacaaagaactatataatttgtatagtaaagcggaatggattgtatgtgatagcaaagttatttatttattttccagattattacagtgctcattaagagacgtgattcctggtagtagtttttttccgaagttttatatgtatcataaggatgatatggattgtaggatattcttacttggtgctatggaaggtgtggctgttaaggcaatggagaatattaatcaaaaagtagggagaaaaattgtagtgggagcttattctccttcttatggctttgagaaggaacagaatgagaacgaggaaatttataaaatgataaatgaaagtggtgccaatgttgtgttggtaggcgtaggttgtcccaaacaagaaaaatggatatttacccataaagataaaatgcctgaagtagatatatggatggctcttggcgctaccatcgatttcgaagcaggtaatataaaacgtgctcctaaaatattccaaatcttggcgatggaatggttctatcgcttcctgaaagaacccaagcggctgttcagacgctattttatagatgatattcaattcttttattattttgcaaagcaattattggggctttacaaagatccttttgcatagtttccataaactatgtaaggaaacaatgggtaggagcagaatgaaagatatcaaccaaatcatcccattcaatactaataacactattgcttgcaaacgtttcatggaagcaaagatagattgaattctcataataatgggtagaaaaatacgattaattttaatatgccttattgcgattagctcgttacagagtcaggcacaggcactatacggcacaacaggacttcttcatgcccccactgccgagatgcaaaaagacaagacatttatggtgggagggaatgtgttacatcttgttccgttgcagtatcttaccaccaatgagataaaatacacattcaattattatctgaacataaccatctttccttggctcgaagtggggtacacctgtaccatcaattatgcagagcatggctccacttattttccggagcagtcttggggaaagtataccaatcaggaccgtgccttcaacgcccgtttgcggttgtggaaagaaggctggtggaagtcttggactccgcaaatagtcattggtctggacgatcccacctcgcatgaagcatacggtggtggggccatcaagttcgatgaggacggtatgcagaacaatcattttacacgatattatctggcggcaaccaagcatttcagtttcgccggggtagggacgctgggtgttcacgccgcatacgtggattaccgtgcctgctggttccctcattacagaaggcctgccgcgggtgtgaatttcaaattcaatctattgccggaagacaacctggcggtgaaagctttgaacggcttggatctgatggccgaatatgacgcccgcacagtaaacatcggggcacactaccagctttggaaagaccacatcaacctgattgccgaactgaacaacgggaaatatttctccggtggcatttactttaaaatccatctgaaatgataaaaaagactatccgattaggatcttcggaatagattctgttcttttgtaaaaaaggaggatttatggtcggaaatataagtataacagatgtgtatatgagtgtattgtcttcactgagtgtagatgaaaaaccggatttgattgcaaaactgacaaattccatcagaaatacgtatacaaaggaacagaatattgaaacagaagatccttttgcttgttacgaaggcgattggggcggaaatatgtcggctgaggaatatgcagatgatttacgtaagccctaatttgagggtttacctttcttatatccaactgttgcaaagataataaaacagctattccgggtgcaaaaaaccgccatagaggcagtctccatgcagaggcgctctatggcggtttctcgtttctccacgtttaccggggaaaatttccgtttccgggaagccgggaggttactcttccatcttgagcttgcccagttctttcaggatgtgctccatggcttctttgtaaacctccggtttctccttttccagccatttcatcagtttgaagtaagaatttggagtcacaatctttccgtctcgaattttggtggcggtggaccggcctatcgcacctttgtcgcccaagttgttggggtttaaatcgtttcttcgcacggcattaccgatgcaggtgctgatgatctcaaatttttttcatgttactaaaaattaaattattaaataatgatttgtaaacagcataaacatagctacttacaaaatgtctcggcaaagataggaaatgtttattaacaattgcttgtttttgtgagcaacgccctatttatattttgcgttcctttgcgttatatttatactaacacacaaaagaaatggattatacagagcagtttatccggctgaattgcagtttgatgtcggattacaaaatgatgaagctgaatgccgatatgaaatgcatggggctggggttgtatcttgaaacgatattgtttctgcgcaaacagcaggaatacaaacatgattttaatgaactggatttgctggccgatcagtggggagctaccgtggaaaatctgcaacatcttattaaggacttcgatttgtttctcattacagaggacgggtatttccgatgtctgtatctggacgaggtgatgggatatcagagcaaactttccgagcaacgtgccgctgccggcagtaagggagggagaagcagtaagaaaagtacggtgaaagcatctgcaaaagcaactgcgtctacagcgtctgcaatagggaggggcagaatcaacgaggggaaaaacggtgatacgccctgcatggataataacggggaagtctacctgaaaagcgatgatacaccttgcatggataataacaaggaagtctatacgaaaagcagtggtgcaccctgcgtgaataataacaaggaaatctacatggaaagtggtgatacaccttgcgtggatcgtaacggggaagtctacatgaaaaacggtgatacgtcctgcatggataataacgggaaagcctacctgaaaagtggtggtgcaccttgcatggattgcaacgaggaaatctacatgaaaagtggtgatgcgtcctgcatggatcgcaacgaggaaatctacatgaaaaatggtggtgcaccttgcatggataataacgaggaaatctacatgaaaagcgatgatgcgtcctgcatggataataatgaggaagtctatacgaaaagcagtggtgcacccagtatggatagcaaggagagaatttatatggaaagcagcaatgtagatagtaacaagactgtctgcatggagaacagcaagccaatccattcggattataataaggaaatctacaaggaaaacagcacggaaagaaacgtgaaaagtagtgcggaaagtatgaaaaatacgactgcaaaaaacacaaatgaaaatttagtcaaaaatgtgattcaaagtgttgataataagcgatatagaaagggattgcaagcaagctttaagcaaaactttataagagaagaaaagaatagaggagagaagaaaaagaaagatgatgtagacatcatagaaacaaacgacagcatcgacgacgacatgaaattttgttccggaaaaaagagcggagagatgttgcgatgggagtgttatatcaatgaagctttcaaagtccaaagttgggtggaaatcgtgggaatgatgtcggggttgaaaggagactttctgaacaatcttccctttatccgttccatgtttaaaaaacatgttgtggttcaaggaagtacggaacgcattacttccgtatccgaagcgcaagcctattttgctaattatatccgtccgggaaagcccacccgtctttttctggaagaaaagctgaaagaaaggagcaggatgcaaaatgaatcgacatcactttcaccctacgaaacgtacaatccgctgaccggcgaacgttcgtactgcggagtccctcttcctgccggtgcaccaccgcgccccaacggacgtgccacctgggataacctgaaacagagctggatatgacgcgcgaagaacatgcagactatgtgcggtggctgaaaagtctgccgcgcagaaaggaccatttccgtatgccttgtcccgaatgttccgcaacgcgaagcaatcccaaagatccttcgttcagtgtgcatatcacccgtgaagggggatgggcgaaatgctttcattgtgatttcgccatagcgtggaacgaggacgagatgtggaaaagagaacagaaacaacaagaccgggaacggcagaaacagcagaaggatgcatcgcagcaccataacacgtcgcagcaccacgatgcagcatcgcagcaacgtaacacgtcgcagcaccacgatacagcatcgcagcaacgtaacacggcgcagtaccacgatacagtatcgcagcaacgtaacatggcgcagcaccacgatacagcatcgcagcaccataacacgtcgcagcaccacgatgcagcatcgcagcaccataacacggcgcaacgcaagccgcacatccccctgcaaccgcctgtacattacgtatgcccggtaatcaataaaaacaaacaaattatgaatggagaaatgatggaatacatggtcggcagacgaggtattccgatggacgtcctgacaaggatgaagatagaggaacgcttggaattcctgccgcagaccggcaaggaagaagcctgcatctgcttcccttacctggaggacggagtaatgaaaaacatgaaattccgggatgccgcaaagcatttcaagatggtgaaaggagccgagctgattccttggaacatagacgccataaaaggaaaggaaaagtgctacattaccgaaggcgagatagatgccctcagcctgatagccgcaggactggaagaagtggtgtccgtacccaacggagccggaggcgcgaatcttcagtggctggaccgcttcgtggagtcgcacttcgatgacaagacggaaatcatcctggccatggataccgacaagcgcggagtggagttgcgcgacgaactggtgcgccgcctgggcatggaccgctgcaaggtggtggcctggggagaaggctgcaaagacgccaacgagtatctgttgaagtacgatcttccgaggctccgccagcaggtggagcaggcggcggaaatcccgttggaaggagtcttctgccccatggacgaatgggatacgctgatggatatttattacaacggaatgccggaaggagccgatacgggactggagaatctggaccgtctgatcaagttcgagcgtggttttgtgctcacggtcacaggcgttcccggcagcggaaaaagcgagtttgtggacgaaattgccatgcgtctgctcctgcgccacgattggaaggtgggctatttcagcccggagaataccccgctggcctatcactaccgcaagctgatacgccgcgtggtgggcaagcgttttgaacacaaagggatgccgttgccggaagccggacaggccatccgttacctggcacagagtgtcttctccattatgccgaaagaggatttctcggtagagagcgtgctccgcattgccgcccaactggtaagccggaaaggagtgaaggtgctggtagtggaccccttcaaccgcttcgagcatcagattcccgactgggaaacggaaacgcagtacatcagccgcatcttcgacgagttctccaattttgccgtgaagcacaaggtgttgctcatcctggtggcgcatcctaccaagttgcgtcgcgaaccgggaagcaaacgctggcctgtgcccacgctgtatgatatcaacggctcggcggcctttttcaacaagacggattatggaatggtgatagaccgtaacgatgagctggggcaggtgctggtgcgtgtggccaaggtacgtttcgaccatctgggcggaccgggagatgcttttttcgccttcagcacttacaacggacgctacacccctaccgaggagaggaccttggatcataatccgcccgaaccgaagtgggagcataccaatttcctgacagagaagctgaagcccgaacagcaggatctggggtttaatgagggggaatgaagaagttgaatgttgctgttcctgaataactcagggataggagaagggagatatgtcaaaacaaaaaggacagccccgaaaagttacagatagtaattataacacgtaaaaggggcgtatcaagctctgtatggagtaatgatacgaccctttctttagtcttttaggatgctcaaatttcagattataagttcatgttttcaaaaactgagttttgacacccgctttttaggtcttgtagttacaatctgtaacttttcggagtagttatttgattttgacatacccctttaaaagttgtttacaagtagatcatgttgccggcaggttttactgattactgaccattcctcagtgatcactgatcattcctcattaatcattagccattaaaatcctctccaccgttcccgttttatctcctcgcactgccgtcgctgccatgcgggcattattttctccagttctttcagtttccatcccttcataaagcgtatctcgtccttttcctgctccgtgcacaggctgatgcgcagcagttcgggatagagcacctgtatatggaaaatcttggctctccacagcagcatggacatctgccagggggtgagggcatggatgcggttcagggtgagtagcatttccagataatgacggtagaaggctttgtccacggtcatgagttggtttatcagatagttcatttttattattgttaaatgaaaagattagttgaatggatagtcaggaaatcaaagcggaggaaaggaatgctatctttggagaaatcatccttggatacggtatctttggagaagcctctttgaaaacaaacggttctcattgggaaccctatctttggagaaatcatccttggatacagtatctttgaagaagcctctttgaaaacaaacagttctcattggaaaccctatctttggagaaagcttcccttaaaagcggtattcctttacagcatcaaaacaaggacacggtttcacgggattcaggtcatgatgccccactatcaacgctttggggaacaggaggcgcagctcgcgcagcagtgccagcatacttcccttctgcatcagagtacgcgtatcggcaggtgtgcagtccgccgagagtccgccctcatagcagatgccgatagaatgccggttgtggttcttgcaatgcgctcccaccttttccagaggtcgtccgcggtgaatctctccgtcgcgggtgatatagaaatggtatcctatgtccgtgaagccccggtggcggatgtggtcctggcggcaggtttcaaaatccagcctccgcccctcaggggtggcggagcagtggataataatcaaagtgatggttctcatgttcatcagatgcaggcgttcaggccgagtgcgccggcaacggcggtggctacggtgataattactttcagaatcagtgtccaggtgtttttctttgttcttgaactcattggaattttgttttagaggttgataataagtgaattgtaatggaagccaagggctgaatgtgcccctatgacaagccgtttttcattggggcacattcagccctttagcgtcgtgccttgcctccgtcgtactgggggtccgtcaggcctgtcctccgttttccggctccttcgcctctccggtaagatccacactggtctttccggctttcagcgccttcaccaccagtcgggccgccttgcgcgtggccaccagattgaacacagcttcctcctgcaagttctggaaacgtgttccggcactccagttcacattcagctttctgacatggatggcaggattgtagtcggcagcgctttccgctcctatactgttgatgctgatggagaaatcccccaagtcgcccagctgtatcttctgtcctcccagaagctgttccctcatgcagtccactgccatggtgaggatagccacgatgtccgcacgcttgtacacacagccgtggctggcgatgtgttcggcaaagcggttgatgtccatcacttcagcatactgtgcactggcgtaggccttcttggcggcatccacgtccatcggattgctacgcataacgatactgtaatttaccatagtctgttaaaattaaaagttgataattgagaattaagaaacactgttgccggggaatgaagtaagtcagccgtcagtcactgtccattaaccgtctgccactggttgccgactgctgaaagaaccctatctttcacgtgtaagatcctatatcttacagctgtaagattatagatctttcgccttcatcgtcccgacattacaaagatacgatgtgcggattccggaaagttgattccggtggattgtggttgataacagttgattctagttgattattgttggaaaaacattctttcttctcgtccgtttttcgtacttttatggaagtaaataaaaagtatggaatgtatggagaattttgagatacgcacgtacggccgcaccgaactggccctgtgttatttcccggatttgaatccgcaggtggcttaccgtaagttgcagtattggattgactattatcctcacctcagggaggagctggagaagatgggcagtggcttgagctgccgtacctatatgccggctcaggtacagctgattgtgggggcgataggggagccgtgaaaggggattgtgatgggtgtgcagccaaataaaaagaatagcttccccaattacgtaatcgatattgcaagtgaacgaccggttcgtgttgacagttgcattgaaagattggcaatgttgatatatgtgaatgtaaatgacacgaatgacgccaatcagagatataaacccaatttgcgccattcgtgtcataaagaacggaatagaacctctattcccgtatttcccccttatgcaccagtattttcaccagtgtccgtttggaattgtgcgtgtccgaaacccatagcacagagtcgttttgcgcatagatgcgggcaggctgggaaaaagcatatccttttacagtttttattttcttgctccattcgttggactggcgttcatatatgttgatggcgtcattatcgccggtagcataccagcggtcgccgcacaacgccagtgtcttgggcttgaagccgggcgacagggaaagatcgtccagatcgatggaagcgtcgtttgccagatcatcgttgaccagtgccggatcgagcacccgtattttctttccttcataatccgtgagcagcagatgcccttccgcatcgggctgcatggaatggctggcaaagccgttgttgcccggactgccgttgccggatgcccggcggtagcggttcaccttctggtaattatccggggtggcatcctcctctttgtaaatgctgaccattccgttcttgtcgcgtgcgaaaatcagcccgtcctttaccgtcatggcctgtgcctggaatacggggccgctccattgcccgttgcctatgcaggtgaggtaggacagttccggcaaccggaatacatggatgcgcgactggcgttcggccacatacagccggttgcccgacgggacgatggcctctatctgacttccgaaactcttctccccgccgtcgtgctgccagctctgcaaggtccccagccgttcacctttctttatactgaacagcaacaggctgctgcctgcctttccgatgtttgcgatgaaaagggtatcccccagatgggcgacggtataaggggtgaaatcctcggccgtttccatgcccagggtttccgcatcaatcagttgcgctgcctcatacgagtaataccagtaactgttataatccccgtttccttctccttccccgtttcctccgccgggagcggaggggtagccgcagatttcatccagggtgactttgctgcattgtgccgtcaggactccggacagcacaatcaggatataagcgtatattttcatgttgttcttactatattatataggtatatatttatttcagctcactcatggggatggcgtaaacgcatgtcccgtttttcacgcggtcggtgatgaacagcgtgtggcggcggatgcagaacttctcgggtgcttgcagggtgatgccgccgatggtggtatggtccttcacgatctctcctgtccggggattgacctcacagaacttttctgtaccgttggaacttacaaacagccttccttcgtagaaatccaagtcgtagggtacatttttataagccagttgcccggtacgtttgggggaaactccttcccgtatcccgtcgggggcgaacaggtctatgcgtttggcgggatgggtggagtagagcaggccggtctgttcgtccactgccatgccgtaagtgccgtttgtctcgcccagatgttcggagcgtacataaatccgcggagtcactccggactgtatagcctgctcttctacaaagttgacgtagcgtttgtcgtgtatcatgaccagccctttgtagagcagcacatcgaaggcatgtacggtctgcgtgggccctgttccccagcttccattgcctatgcaggtaaggaactgatggctcttcgcatcaaaaatctcggtacggcttccttcgtgggtgacataaatcttgtcgtgggcacgggtgacaccgttcgggcggccgccgaatttcccggtagcttctccgtgcttccattccttgatgcttcccaagtgcttcttgccgccgccggcaaggccgaacacctctacgctgtactggttgtccgcatcgttcacggcatacagggtatctccgtacacatatacatccttggggcggaaggtggttcccgtagcgccgggcaggtctgtataatccagcttgaacgccaccggctccccgtcgtttcctccccggtcggtttctccgcgcaggggagacaggccaccgtccagcgcatcgagttccgggtcttcgataatgtgtttcgaagccacgtatatatcatcaaaataacggttcctgctccagcgggtgtgcaggaagcggcgggaatagacgggcagctccttgtccagcgacagcgccacatatacgttgttgcacagggtgatccaccccggtcccgtctgttcgtaggtcatgtttcccgcatggccgtagcccacacagtgggcaaactcgtggaatatggtttcggtgatgcttttgtcatcggcatagtgttccagataacacacttcatgcatgccgaaggtggttcctccgcccagtcccatcacgccggtggtatagccgaaggtcagtccgcggtggttgagcacgttggccagcagggcggtcttgtctatttccgccttgtcattgttgctgtgcagcgggccgaactcgtacagggcggtcttgaaccgttccgacgagaacatatatcccatgttcagcgcgatggccaccgcctcacgcgtgtgcgaagccttcatcttgtacttccagctgtcctgggtgtcactgtatctgccgaaggcgatgtaccatttgcaacggatggattgcagccttgcccagtacgggtcgtcacactctacggtgaaggtcaggttttcttccgtgaggtaggggtttgccatgatccgtattttctttccgctgcgggtataggcggtcaggtccttggtggcgaacggtatgtgtacccggagttgctggaaaggcatgatcttttccagcgacatgaacttgaattcttcctcgtaaccgtctatcctggcccagaaagtcacgtttttcaaggctctgggactatagaaacggagttggaaacagtgctcgtcgtccattccgaactgaagaggctggctgacgtagaagctgcgctggctggagtcgaaataaacatcctgggattcattgtcattcagcaggtaatacgtgttgtccgggttataatccgtttcggccagccggatgggcaattcattgtttgccacgtttccttctccggaaaccggaagttcgtcctctttgcagccgcccagcagtaaaagcatacctgctaaaatcaacaggctggtggaaaaaagttttttcatcgtctgtttttattagaattacatttaaatttgaaataatcactcttttgaaaaagggttgcaaaaataattgttttagatcagatgaacaaagaacccgtattgcattttatatgagtccctgttttttatgttcttttgtttttctgccttaaaaaaataaatcctatattgttgccctgggctttgttcatcggaaaatatgctgtatttttgttatccgaaataaagatgaagatatggcacaacctttagcagaacgtttgcgtccgaagacattggacgattatataggtcagaaacacctggtggggccgggggctgtcttgcgcaagatgattgatgcgggacgcatctcctcctttatcctttgggggcctccgggggtgggaaagaccacgctggcgcagatcatagccaacaagctggaaactcctttttatacactgagcgcggtcacttccggtgtgaaggatgtgcgcgatgtgatagagaaggcgagaagcaaccgttttttctcgcaggccagccccatcctgttcattgatgaaatccaccggttcagcaagtcccagcaggattccttgttgggggcggtggagacgggagtggtgaccctgataggcgccaccaccgagaatccttcgttcgaggtgatccggcccttgctctcccgctgtcagttgtatgtgttgaaatcattggagaaggaagatttgctggaactgctgcataatgccatcgcaaaggatgtgatactgaaagaaaagaagatagagctgaaggagacggatgccatgctccgcttttcgggaggcgatgcccgcaagttgctgaacatactggaattggtggtggaagcggatgcggatgccggaaccattgtgattacggatgagaaggtgaccgagcgtctgcagcagaatccgttggcgtatgacaaggatggagagatgcattatgatatcatttccgcctttatcaagtccatccgcggaagtgatccggacggggcgctctactggctggcgcgtatggtggaggccggagaggacccggctttcatagcccgcaggctagtcatttcggcagccgaggatatcggtctggccaatcccaacgcattgcttctggcgaacgctgcttttgatgccgtgatgaagataggatggcccgaggggcgtatcccgctggcggaagctacggtgtatctggccaccagccctaagagcaactcggcatacgaggggatcaacagcgccctggaactggtgcggcagacgggtaacctgcctgttcccttgcatctgcgcaacgcacccaccaagctgatgaaacagttgggctatggcaaggattataagtatgcacatgcctatcagggcaatttcgtgcagcagcagttcctgccggacgaggtgaagggcagccgcatctggcatccgcagaacaatgcgcaggaagcgaagataaaggaacggatgcagagcctctggggggaacggttcaaggaatgaaaatgaattacattgatcctgtgctataaaattaaaaattggaacgcaaatgacataaatccaaccttccggccggtttatatccatgctgtgcagctgttaatttgcgtcattcgcgttccaatctaaccgaataaatgaacaaaatatgaaatttaatttttgaaaatatgaaaatagtagttttagacggttacggattgaatcccggtgatttgtcatgggaggagatgcaggcgttgggcgagctgacggtatatgaccgcacggcccctgccgagttattggagcgttctgccggagcggaagtgctgattacaaataaaacggtgattacggcggaggatatggccgctctgcccgccttgaaatacatcggcgtgctggctacaggatataatattgtggacatccaggctgcgaaagcgcggggcatcattgtcaccaacatacctgcctacagcaccgcttccgttgcccagatggtctttgcgcatatactgaacatcacccagcgtgtaggccattatgcctatgccaaccgtcacgggcgttgggcaaataatcccgacttctgctattgggataccgacctggtggaactggacgggaagaagctgggaatcatcggcttgggaaacaccggacaggcgacggcgcgcatcgctgccgctttcggaatgcaggtatgcgcctatacttccaagccgcagtcacaacttcccggaggaatccggaaaatggagctggatgagcttttccgcgaatgtgacgtggtgagcctgcactgcccccttacccccgataccaaagaactggtcaatgccacccgcctggcccttatgaaaccgacagctattctgataaataccggccgcggtcccttggtaaacgagaaagacctggccgacgcactgaacaagggcgtgatagcggctgccggactggacgtgctttcttccgagcctccccaatataccaaccccttgctgacggcgaagaactgcttcattacgccgcatatcgcctgggccacgaaagaagcccgtgtccggctgatgcagattgcggtggggaacttgaaaggatttatcaagggtgagattgtaaataatgtggcggaatgagaacaaaggaaaaagacgggaagaaaagaaggaggtgagaagaatggaggaagacaagaatacgttgggtttgcatccggaagttagggaagaagatagagtggcaaaggctgtagctttgttcagggaaggatataactgctcccagtccgtagtgacggcttttgccgatctgtatggtttcacccgtgaacaggccctgcacatgtccgcctctttcggcggcggtatagggcggatgcgtgagacctgcggtgctgcttgcggcatgttcctgctggccgggctggagaagtgcgccgtcgaggggaaagaccgtgagagcaaggcggcgaattacgctctggtgcaggaactggccgaagaattcaagaagcggaacggcgccctgcggtgtgccgatttgctgggattgtccagaaaagagccggtagtatccacgccggaagcaaggacggaacagtattatgccaagcgtccttgtgcaagaatggtagaggaagcggccaggatttggagcgaacacctcgaaaaacaaaaaaataggttgaaaaatcgctttttcttatagaaatacaaacttttttgatgcaaaagtgttgaataacataattttgtgtatctttgcaagcgataagaaacacaaacattcacataggaatgtgtgggtgcggttaacgtttaactaaaagcaaattgaaaatgttgaaagaaaaagcaggtgctttggccggacagatctgggaagcattgaatggaactgaaggtttgacacaaaaacaaatcaagaaagcagccaaattgaaagctgacaaggatttcttcctggggctgggctggttactgagagaagataaggtcgttacttctgaagtggaaggcgagatctttgtaaaattagtgtaagaagaagattttaaactcataaaaaaatgcgttggcacatcgtttggtatgttgtcaacgcattttttttgtatatttgttgaagtctgagatatctataaaagaaatgaaaaataagagatttgcaaccggcaaaattgtagtattcaggcaaaaaagctacttttgtattgttgtttgagaatgtaaacaaaattttgatgatacagaaaataacgattgaaggatacaaatcaataaaggaacaaactgtagagctgtttcccataaatatattgataggtgggaatggaataggaaagagcaatttcatttctgcctttactcttatacataacctgtacgagcggaatcttcagaattatgttctcaccaaaggcggctccgacagtttgttgtatatgggaaaaaaagaaactgatcatttgtcctttgacttgttttttgcggaacgcggtaaggatgctcataatcgttttattgtaaatatgaaagaggctcaggattctttatttattgagcgtattgatacggcttatcacaatggggtatcctggcacaaacaactgcacgaggtcaacaagcaggaatcttcatttaagaacgaccataccggacaggcattttatgtaaacagcttcttacgcgaatttgaggtgtatcatttccatgatacgggagaccgttcccccatgaaaggaaaatgtaatatggatgataatgtcagcttgaagaacaatggggctaacattgccgcattcttatattatctgaaagaaaagcatccaaaacatttcacacgtatagaaaaggcggtagcttcggtatctcctttttttgagggattctgtttaatgcccaaccgcttgaacgaacagctgatccagctggagtggaagcagaagggagctgttgatacgtattttaatgcgtaccagttatcagacggaacgctgcgttttatctgtctggcaaccttgttgcttcagccggatctgccaaagacggtcatcattgacgagccggaactcggactacatccggtagcggtcaacaaactggctgctttgatcaaaaaagcctccagagaagctcagataattatctccactcaatctgtcaatttggtggataactttgaaccggaagatatcattgttgtggatcgtaaagacaacgcgactgttttcaaccggcttgattctgagaatttagcgcattggctggaagattacagcttgggagaaatatgggagaagaatgtcattggcgggcagcctttaaattgagtgggaatgaaaagagtagtgtttatagttgaaggcgatacggaagtgagttttattcagaagcgtgtaattccctatttgtattcgaaaggatttactaatcctatgaatgcccagaaaatcttaacgaacagaaaattgaataaaaaaggtgggaatgtgggttttgaatatctgaagaatgacgtttcacgggtggctgcgacaaaaaacgtgttaatcacaaccttgcttgactttttcagacttcctacagattttcccggctataccacagacagtttgagactgccggatatggaacaggggataaaagaaaaggtaacggaatttatggatgcttcctgttttctgccttatatccaacggcatgagattgaatccctgatgtataccagtatggacggtttcaatgttgtggtggatgatcaggaaagcttggatgaattgcagcggataatagattcatatcctacccccgaagatataaacggaggggcggataccgctccttccaaacgattgatgaggatattcccgtatgagaagactgctgacggggagatgattcttgaggcgctggatatagatgatattcgaggcaaatgtcctcgttttaataaatggatggaaaaattggaggaaggacttaagaacggccacttttaagaatgaatattgttggcaaatcttctggttttgatttcagatggtttgtattattcctgcaaaattcatccgtatatgagcgagtttttgtatatttgcgcgaaatttaagtgacgaagatgaagaatatccgtaatttttgcattatagcacatatagaccacgggaagtcgaccttggccgaccgtttgttagagttcacaaaaaccattcaggtaaccgaaggacagatgcttgacgatatggacctggaaaaggaaagaggtattacgatcaaaagccatgccatccagatggaatacgagtatgggggagagaagtatgtactgaatctgattgacactccgggacacgtggacttttcatacgaggtatcccgttccatagccgcctgtgaaggggcgctgctcattgtggatgcttcgcagggagtgcaggcgcagactatctcgaatctgtacatggcgttggagcatgacttggaaatcattcccgtgctgaacaaatgtgatatggcgagtgccatgcccgatgaagtggaagatgaaatcatcgacctgctgggctgcaaacgtgaggatattatccgtgcctccggcaaaaccggaatgggtgtggaggagatattgaaagcggtggtggaacgtatcccgcacccgacgggtgacgaggaggcgccgctacaggctttgattttcgactcggtattcaattctttccgtggaatcatcgcttattttaaaatagagaacggcgtgatccgcaaaggggacaaggtgaaatttttcaataccggcaaggagtatgatgcagatgaaatcggtgtgctgaaaatggatatgattccccgtgcggaactgcgcacaggagatgtggggtatatcatttcgggcatcaagacttcgcgcgaggtgaaggtgggggataccatcactcacattgcccgtccgtgtgacaaggcgattgccggattcgaggaagtgaggccgatggtgtttgccggggtctatcctatcgaggcggaagattacgagaacctccgcgcctcgctggagaaacttcagctgaatgacgcctcgctgactttccagccggagtcctcactggctctgggattcggattccgttgcggtttcctgggattacttcacatggaaatcgttcaggaacgtctggaccgcgagtttgatatgaatgtgatcacgaccgtgcccaacgtgtcgtacatggtatatgacaagcagggacatgccaatgaggtacataatcccggcggtatgcccgatccgacgctgattgaccacatcgaggaacctttcattgacgccacgatcattaccgccaccgattacatcggccctatcatgacgctgtgtctgggcaagcgtggcgaactggtgcggcagaattatgtgtcgggcaaccgggtggagattcactacaagatgccgctgggtgaaatcgtgattgatttttatgacaagctgaagagtatttcgaaaggatatgcttcctttgactaccatcagtcgggtttccgcccttccaaactggtgaagctggatatcttgttgaacggtgagccggtggatgcgctttctaccctgacacatgtggacaatgcctataacctgggcaagcgtatgtgcgagaaactgaaagagctgattccgcgccagcagtttgatattgctatccaggcagctatcggggccaagattatctcaagggaaaccatcaaggcggtgcgcaaggatgtgactgcgaagtgttatggcggtgacgtgagccgtaagcgtaaattgttggaaaaacaaaaaagaggtaagaaacgaatgaaacagatcggtaatgtggaagtaccgcaaaaggcgttcctggccgttctgaagctggattaattcaagaataaaacaagctctgaggagcaaacaataagcgggctctttctgttagttgaaattaaaaagtcaataacagaaagggcttgtgttttgatggcaatttatcacaaactcttaaattcaattgatatggaaaaactgaaaattctgaacttgaacttttccttccagcgagcggcgcactatcatattaatggagggatgttgctgatgggggtagtcttgctggctatgttcctggccaattctccgtggggggatatttatgcctccttttggaattacgaagtgcatcttcagataggagaatttaatttctttagtcataacgggcatcacatgaccttgatgacttttatcaacgatgctttgatggctgtctttttcttcagtgtgggactggagataaagcgtgagatactggtgggcgaattgtccagtttccggcaggcgcttttgcccatcgtggcggcgtgcggcggtatgctggttccggtgctgatctattatttcatgacggcgggaactccggcccaaagtggcctggccataccgatggctacggatatcgctttttcgctgggagtgctcagcctgttcggcaagcgggttccgctgagcttgaaagtctttctgactgctttcgctgtggtcgatgatatcggcggcattctggtcatcgctcttttttacacttctcatctggcggtgaactacctgattgcttcggcgggtatcctgctgatactttgcggcgggaatttcttccgggtgcgcaaccgttggttttatattttctggggagtgattatgtggtatctgtttttgcagagcggcatccacgctaccattgcgggagttgtcgcagccttcacggttcccgccactcctcattacaagataggtaagtacattaaccgcatccgggagaacattgctgtctttcctgccagtgacaaggaaggtgttgtgttaagcaagatgcagatcaatgtgctgaaaagcatcgagtcttcctcggaccgtgtcatatctcccttgcagtcattggaagacagtctgcatggaatggtgaattatattattcttcccttgttcgcctttgccaatgcgggtgtctcgctcacggcggatcatggtggcttggaagtggggatggctacttgggcggtgctggcgggattgctggcgggtaagtttgccggcatttatttctttacctggctggtgataaagatggggttcgccggactgctgaaaggcatgacctgggtgaacctgacaggtgtctgtcttttgggcggtatcggttttacggtttctttgtttatagccaacctgtctttcggggattcgccggtgttgctgacgcaggcaaagatgggtgtcatactgggaacggtgctggcgggtgtgctggcgtatctggtcttgcagttcgccttgcctaaacagcctgcacaggaataaaattacagatagggcagtacggcggtgaaacggctgcccttgttcacctcggattgcacatcgatgtgtccgttcattttttctacaatgaccttgctgatggcgagtcccagtcctacaccctgtacaaactcattccgcttgtagaaccgttcgaatatcatttgtaattcttctttagggattcccgcaccggtatcttctacgaagaaatggatttcctttttctctttgtcgcagaaataacccagtttgatgtgtccttgggaggtgaacttcttggcgtttcccaaaaagttggtgatgacttgggtgaggcgcatacggtctatgtgtatggtcacatcctcgtcgggaaattctttgatgaattccacaggagggagaataattacctgatgggtctgatagaccgtttctgcaaaatgatgcgcgctgcaatcctcacaatgaaaggacatattgccggattctatacgggatagttccagcacatcattgaccagtttcaacaagagtctggtattgttgtctatgatggaggcaaattcttttttctcttcttccgagatgtttttctcggtagtgagcaggttggagaatcccacgatggcattaagcggagtacggatttcatggctcatgttggccaggaaggattgtttcagttccgcctgttccgccagtttgcgggcacgtatcagttcttcttccttgtctttgatctcctgaatgtttaccagaagtccggtgatgataggattttgttcataatgctgcaacacgctgtatctgaattcccaccattggtaaccggtgtcgtcgaatttgcaacggtattgggctgttcttcgtggccggtgtaatatgttggatacgttttttctgaactgggcttggtcgccggggtgtacatagttggctatttcctttatttccaacaggttttgggaacggttggtcagttcgcagaaagcttggtcgaacacggcggtttttccgtcgaaacaccaggcgtaggtttttcctccttccagtgcaagcgttaatgcttcgtgtttgagcctgaggttgcgcaaggcttcttttttacgtcctttttccagtgtatagatataaataaggtaggatatccccaagaggagtgtgaagaccaggaggctttcaagaatcaggatgggagttgcgtatttttccctccacggcctgtacatgatggtatattccggtggaatgctttcagtggggatctggtatctcttcatggcctgccagttgaccagatgctgtttggcgatttgttttactgccgggacgggtatctttccttgcagtctttctttgatgccggcggtcatgtcgcttagctgtgtttcgatgggggcgaaataacctcccagcatatattcctttatcccgaatccttcgttgatggtttcgaagccgggattgtcgaacaggctgccgatgcgcagggtggtatagtcccgtttggtatacaggaacaaggagtatttgaagatcccgctggacagccacatcaggtcgcgggcagctacggaatcactggacaggcggactacgatggtggagtccaagtggttatattcgttcagcttttcgtgcagggattcatattcggtatcatctttgtcactgatggggatattcagcttgccgggcagggcctcttgtcttttccattggtggagggtgatttccgatcctttgcattgttcgctcaggtctttccagataaggcggtcaagcacggtccggccgttcaggatgtggatgcggactttgcccataatgcgttctatcatccggcaggtggtgaggtaatcgggtttgtctatgtagcccgtaatgttgggatattgtgccagcaagtcttggttgggataattcactccgctgaatacgacgggaatctgcctgacatacgggtttccgcaagccatgatagagtaggttgcctgatcatcgagcacggcaatcaaatccccttcccatgagcggatggaatctgcaaactcggaaatccgttgctcttcttctacagattcatatttctcgcaatccagataaaaagtgcgcagctggaagtctatttgctggtctttcagtcctttgacaaacagtttgtttacaatgccggcaccgctgtacccttcctggtaggaatggataagggctattttatatttttgtgcataaagcggactccctataagaagggctgtcataaaaatgaaaaaggctttatgcttcatgtcaaacgtgattattaagtgaaccaagggacaaagataggaatgtttctttaattccggctatgatttacaggaaattattggaagagagagggaaagtaaccatcccggtttgtggaaaacagcaattccggcttcttgaaaaacatgcttcttgcttttcaaggaaccggaattgcctgtgataaaaaggaatgggctaacccgttagcgggggttatttgtgttgctccggggtcggggtgctttgagaggccggtccggcggcagcgtttgtagaggcgcttgaagcggaacttttagccgagccggaaaccggagccgctgtctgtgccgttgtagcctgtacttcccagtggaacggttcgaactgtgtgttcttgtctacccatgacggtttgcgcgatgcatagataataaacggagctgcgactaccacgatgcagccgataatcaaaacggcaaaccatacggtgttgctgcctaccgcaatctggctggggggaatgaagctgagcacgaatgccagtagtgaaccacagaaacccagaccgccgatgagccacatcagtccgttgcctttgctgccgatacggaatgggcgaggagcctttttcatattgtaacgcagatagatggcgccgctgaacatcagcagatacatgataaggtaaagcaatacggtgagctgtgacagaatttggtagaaactctgtacggaaggcatcacaacgaacagcagactgagcaaggttacggcaaggccttggaccagcagaatgtttttctgtacgccgttggcgttggtcttctggaagaagggaggcagatagcctgctttacccactgcgaagatacctttggacggaccggccacccaggtcaacacacctgccagcacaccgaatgccaaagccacggcgatgataggtgacaaccacgaagcatggacatacttgaagtaattatcaaaacctaccagcaggctctgagtcaggttgatatccttttcgggaataatgatccccagtgcgaaggtgccaagtacgaagatgattacagtaatagccgcaccgatgaatacagctttcggatagttcttggcaggattttctatgtcttttacgtggataccgcccatttccataccggcatagaacaggaagatactggaagccagcaccaggttgtcgaagttgctgaagtcggggaaaaagttaccgtcgaagttcatctggctctgtccgccggaggcaaggtaaatcaccgccagtaccatcagcaggccggcaggaataatcgtacctaccataccgcctactttggccactttgcctacccagcccatgcctttcagcgaaatgaaagtggccagccaatagataatcaagaccaccgccagtgagtaatagcggttggatgccaaggccatatcatgggtgtcactcatgccgataaaagccagtgccacggccccgaaagtcaatacggtgggataccagatggtgctttccacccactgcaggaagatggcgaggaagccgaatttctttccgtaggcttcacccacccatcggaacacaccgccttgcttgtcctggaacatggctgccagttccgccgctaccaatgaggtaggtatcaggaagacgatggccgcgaataaataataaaatgccgaactcagtccgtattcggcttcggcaggcagcccgcgcagggatactaccgcagtcacgttcataatagcgagggtaaatacccctagcttgactgatttactaatgtttgccataaagtttaggttttaaaaaatatatgttttttgtttacggagtttataacaactccctggaaatgatgtttatccgtttaggtttattaacccggaaggtatgcggaattaaacaatcgtacccggaagggtgtttctagaaaaaataatataatcagtatagtttatgaaaacagctttctcctcatttatctattcccgtagggggatttacgggatcttgcatatattcatcctgttgatgtccctttttctggttatcagtatctcgatagatacttttcataacatccctttcctgaatcaaggttcttatctgaagattcagttctggatatgcatgtttttcctgttcgatttcctgctggagtttttcctctcgaaagaaaaaggaagatacttcaccagccattttatttttctgctggtatctataccttatttaaatatcattgatttctatcacatcactttctcgcccgaaatcagttatttcctgcgttttatccctttgctgaggggagggtatgcactagccatcgtggtgggctggctgtcgggcagcaaagcgtccgggttgtttacctcgtacatcaccatgctgatggccaccgtgtattttgccagccttatcttctttgtgctggaacataaggtgaaccctatggtgacggactactggagtgcgctgtggtgggcctttatggatgttaccaccgtagggagtaatatttatgccgtcactcctacggggaaaatactgtcggtggtgctggccgccctgggaatgatgatgttccctatcttcacggtatacgtcaccagtctggtgcagcaggccaacaagcggaaggaggaatattatcaatcgcaacaatcaaagtaagcgtattcccttgattcattcaataattccttaatatcctcatgtatggttattctattcctttaattcgttccacttgtttgtctaggaagtaaccggcataaaaagaataatcgcctgtttcataaaaggcgatgagccctttcctatagtttaatatgtcggcatctttggaagagtagacagggataatgtcagcattcatcaaagcaatgctttccaccattcgggaagtacgtttgtttccatcaatgaaaggttgcagcttggctatgttgcaatgaagataaacggcccgttccagtggattggtatattgctcctgctgataaagtatttcattcaatttagcccgaatatcgttcaaattcttcgggggaatatatgctgtgccactgatacggacgcctcttgtccttaaatagcctgactcttcatcggaaaccaagcccgtggatatagcttgatgcaccctgaacaaagtacgctcatctatcacttcttgattcttccctttattgatatattccaattcggaaatgaaagtattgtatagattttttagcatcttggcatcttcatacttcttttcggaagtaatgtcgtctttgagcaatgcttctgtttccacgtaagtataagtattaccttcaatcttccctgaatagtaacaccacactactgccagatcttttatttcatttgagcgcaaatccgatagcttagctaaaggatgattcaaaatgaattgcgctttttcctgctgttctttattaaatatctgttccataatcataaaaacaattgtagcttgtggttggattttattgttccctatattaggagagtcgttattaaaagctaagtgctaaatatttgaatatgttttttctatatttcgtatacaaagatagataataaaatttagttctgacaagttacacgagaattctaatcagaaaagatggaaagagggattgtaactgccaaagctgttgtgattactcgttcaaataagaaatttctctaagtcgcttatttcaaatacaattcaatattaaaatgtgattttatacaaaaataagaaaaaagtcttatcttcgtagccaataacaaattgctaacctaaataaacaacaagatgaaattattggctctgtgtgcggcggggataggcttgatgctgtgcgcctcgtgtacaaacaacaaacatttgatcagtgatgaggctgaacgtgccgctgttcagcaggattttgaggcacggcgtgatacgctgacccaaggtaacctcttccaggtattcgaacaacccatgagcgatgaacagaaggaggcgatgactttcctttacgcctatatgcccttggcggatatagcggaccatcccggtgaattttatctggaaaatgtggactacgccttcaaggcgcgtgaggagatgccgtggggaaaagtggttcccgaacgagagttccgccactttgtattgcccatccgcgtaaacaacgagaatctggacgacagccgtaaggtattctacgaggagctgaaggacagagtgaaaaacctttctttatatgatgccgtgctggaagtgaaccactggtgtcatgaaaaggtgatttataccccctctgatgcccgtaccagtagtccgctggcttccgtaaagacagcctacggacgttgtggcgaggaatctacgttcacggtagctgccttgcgttcggtaggtattcctgcccgtcaggtatatacgccgcgttgggcacataccgacgacaatcatgcctgggtggaagcttgggtggatggcaaatggtacttcctgggtgcttgcgagcccgaaccggtactgaatctgggttggttcaacgctcccgcttcacggggtatgctgatgcataccaaggtgttcggacgttataacggaccggaagaagtgatgtaccgcactccccgttatacggaaatcaatgtgattgacaactatgctcccacggcaaaagccgatgtgaccatcgtggatgcggacggcaaaccggtggctgacgccaaagtggaattcaaggtgtataactatgccgaattttataccgtagcttccaaacagacggatgcggacggtaagacgttcctgaccgccggaaaaggggatatgctggtatgggcttccaaagatggaaaattcggttattccaaactgtctttcggacaggacaatgccttgaccgtgaaattggacaaaacggccggcgaggcttatacactggatatggatatcattcctccgatggaaggcgccaatatgcccgaagtgactcccgaacaacgtgcggagaacaatcgccgcatggctttggaggactctatccgcaatgcctacgtggctacattcatgacggatgaatcggctcgcaatttcgctaaagaataccagctggatgaggatgccgttgccaaattgctggtggcatcacgtggcaactacgaaaccatccgtgactttatggcccgtctccgttcggacaagtcaaagaagggcggcattgacctgcttcagcagatttctgccaaagaccttcgtgatgtaagctccgaagtgttgatagaccacatgatgaattcacacttgtgcgccaatgctgattatttccgcagatttgtgcgtaatccgcgcgtgagcaacgaaatgattactccgtataaagggttctttgagaaagcagtgcccgaacaggatcgtgaggcttaccttgccgatccgatgaagctggttgcatgggttgccgggaatatccgtgtggacaaggattgcaacctgggcggctcgccaatcactccggaaggggtgtggaaggcctgtacagccgatgcgcacagccgtgatatcttctttgtatccatggcacgcagcatgggtattcctgcacgtatagacgaagtgacgggaaaagtgcagttgataggcgatgaaggtgctattgatgtgaatttcgaagcaatggaacaggccagtgcacttaccggcaagtttattgccagatatacgccgatcaagtctttggctgatccgaagtattattctcatttctctatttccagactgactcctgccggaactttgaaattgctgaattatgatgaaggcgatattgatatgggtggcggcgctacttgggctaatctgttgaagaacggaacggcactggatgccggcaattatgtgatggtgaccggtactcgtctggctaacggcggcgtattgtcccagctgactttctttaccatcaagccgggagaaacgactacggtggacttggtgatgcgtgaaagtaaggatgatattcaggtgatcggtaatttcaattcagaatctacttataaaccgatggatagcgatgaactgaagtccattcttgccactacaggacgtggttactacattgtagccgtactgggcgccggacaagaacctaccaaccatgcattgcgcgatatcgcggcattgggcaaggactttgatgaatggggcagaggaatcgtgctgttgttccccaatgaggagcagtacaagaagttccgtccgcaggaattcccgggattaccggctaccattacttacggtattgatgtggacggttccatccagaagcagattgcagaaggcatgaagttgtctaacaagactatcttgcctatgtttatcattggtgatacctttaaccgggtggtattcgtgtcacaaggatataccatcgggctgggtgagcagctgatgaaggtgatacataagttgtagaattcagtataaacaaaaagtaacgcggatattcagcttgaaaccctgaatatccgcgtttaatatgataataacgtttatgcttgcttattacttgtcatcatccaaatcatcatcgtcatcgtcccagtcatcctctttctttgatttcttggggttgaggcttttgtttttcttttccagtgctttgtcgttttcgtctttcaatgccagttcggacaaggcggcttttactttgtcaggatcagtaacatccttcagatactcttctatctttacagtacctcccatagatacttttgagttacgataaatcatgccgctgtctacgctgctccgtccggagaaatgaaattccgaagttccggtttcttcggcaatcttacggatattaccggcattcacaccgcatcccggcatgatgatgattcgtccgtcggccagttctaccaattcttttaaaagagggatacccttttcggcggtcgcttcttgtccggaagtaaggacccggtcgatacccaggccgataatctgttccaaggcctccttgggattgctgcacatatcaaaagcgcggtggaaggtgacactcatctcgcctaccgcattcatcagtttctgcatcaagggtacatcgacattgccttctgcggtaagacatccgaacaccacaccgtccgcacccaactgacgtgccactttaatatcatgcaacatgatttcttgctcgatgggagaatataggaaatctccgccacggggacggataatgacatgtagttttgtttggttcaataattggcgtgccatacggatttcgccaaaagacggggttgttccgccttccggaatacctgcacatagttctacacgataagcaccggcttgttgtgccttcacagcactttccacggagttggcgcaaatctcgatttttgatttgttactcataaagttatttaatagttaattcaatcacataactaacgtcatcgggcgctttgggctgtttcagcaattttctttcaatatctccgctaggggaccataaatggtttctctgcatgagttcatccattggcccagttctttacggatgactttgttcttcataatatatgaatttgtctgtgcaaagataggcataatgtaagagtgtgagaaatatttagcggaaaaaatttttagttaaaaagccggtacttctctcggggtgagagaaatatcggctttctgtcagaatagaatatattattgcacgtggatgcggtgcccgttgaatacgttcatgcccagtttgttcataatatatttgatggcaagctgcgcttttacggagttgccggcatcgtccaaaggaggcgcgaaggccgaaatacccattacacccggcatcacacccatcacaccgcctcctacgccggtcttggcagggattcctgaggtgtaaagccagtcgcctgtgtgctggtagaaacctacggtagctatcatggaggtgattttcggggcgagggccttgtcgaacacttgtttgtttgtattcgggttcaatccttcgttggcgatggtggctccgcagatggacaattgttccgcggtgatgcccatagagcactgacgggtgtagaggtcaagcgacatatcaggatcatcgtagatacggttataatttttcaataaccaggcgatggaacgattgttgaaatttgttgcagactccgatttgtacaattcgtcaatcagttgcggggcacttccgcatagttcggtcatattgtctacgatggctttccacttgccgtcgctgttgcctaggggttgtaccatgctgtctgccgagatggccccggcgtttaccagtggggtggaagggtggtcgttttccaacaggatagccatgatggagttgaacggcagtccggtagcgtcggcgccaatcatttcgagcaccttgggggcgccgtattggcggagtaccaggatggcggtcagcaccttggaaacggactcgataccgaaacggtactgagagtcacccagttggatgatttctccgttcatcagacagatactgattccgaacagtttgggatcaatatttgccagataaggaatgtagtcggcgttcttaccgtctgtattgtctttatacagattgtaggcctcttgtgcagcatcctttatttgctggatagttatagttctttccataaattaatttgattgaagtaaccatccaccttaacggcggatggttgcattattgttatttatgcttattttttagcggcgttgctatgggcattgtgagtaaacacagtaccttttacagcgatattcttgtcttgggcgatgcgggtaggagtgggatattccagtttctcgaactcgctgatggcattcttgatgtcgttcaacaacatatccgccatgtcacggctgaatccctgacgtaccacaacacgcataaccacataattttgaatgttctccggcaaggtgtaggcaggaaccatccagccgctttgttgtaatttagcctgcaaatcgtacagagtccatttggcgttctttgcgtattcgggtttcatgtaccagatgaacaaaggatttaccactttgtcgctgtagtttacgaacggagccatcttggctatttcgctgtgaatgtacttggtgatttccatggaattgtattggatggctttgtatccttggaatcccagacggataaactgatagtattggcctagaatctgtgcggcggggcggctgaagttcaaaccaacctgtgtgatgttcgcacccagataattgacactgaatgacatggcatccggaaggtatttcttgtctttccatactacccatcccagtcccggataaaccagtccgaacttgtggccggaagtgctgatggaaagaacccatttcaaacggaagtcccatttcgtttcggggctgaggaacggcaggatgaagccaccggttgcggcatctacgtggataggaatatcatagccggttttggcgttgtaggcatccagtgctttgtccaatgcttctacgtcatcgttcagacctgtccatgtcacaccttggataggaacaatacagatggtgttctcgtcacacatctttaaggcttcttcggggtccagggtggtcttgtccagagtaagaggcacttggcgcatctcaatctgccaaagttgggcgaatttctcccatacaacctggaaaccgcttgaaatgacgaagttaggtttgtcggtcggtttgccctgggctttacgtctgtctctccagcgcaaccaggcagctacaccacccagcatacaagcctcgctggagccgatggccaacgctcctgatttccattttgcctgttcgggggaattccataggttggccatgatgttgatacatttggcattcatcacggcgatacgcgggtactctgtttcatcaatatagttgatgttgatagcttcgttcatcaatttggtagcataatcgtccatataggtggtaacgaaagtagccagattaagacgaggctgggtttgggcgaatgtttcgtctttaaccatttgataagcaatctgcggagtggtaggttccatgggaatggtgtctaccggagcaggttgcagcatttcgtttgaaccaaacacggctgttttggcgtcaccgtctctcaaatcacaattacaatctttcatttttacttaaagtttaggttagtaatacaatgaagaacgtgggagtttcccgcgtttttctccctcaacataggggttggtgaaaagttccttgattttatgttttttaatgtaagtagggggaatacaaaaaaacgatgggaatcattgtactatgaacgaaaaagagatacctttgtttatacataaaatcattggatgcccgtatccgatattttaggggtatgtaatttgataaactgcgtttaggaaattaacataggcgtaaactttgacactacccggcataatattttggaatggaaagtaaaggaataaacgatatgtcgctttgaaccaaacgtcttttgccttgttgtgtatctcatacaataaattactacaagtatgaaagtacagacagggcaggggactattcccctcattactttaataggtatattttccatttcggcattaaatgcattgccgggattggcggtttctcccattttgggcgatttgaataaaatctttccgtctgctacagacttggaaatccagatgctgtcctcgttgccgtcacttcttattattccttttatcttgttgtcgggtaagctgacagagaaagtgaacaacctcttgctgctgcaaatcggcctggccatctttggggtgagtggtatcctttatctgctctccaataagatgtggcaactgatagccatcagcgccatgttggggatagggtccgggttgattgttccgctttccaccggattgatatcccgttattttgtgggagcttaccgtacgaaacagttcggttacagttctgccataaccaatatcaccttggtactggccactacattgactggctatctggcggaagtgaactggcatttgccgtttttggtttatctgtttccttttatatccatttttcttactcattatctgaagaaagacctctccagttatcatccgtctgatgatattccgtctgataccgccaaagaaatgggcaagaggggaatgaatgtcaaggccttaatcaagctgatggctttttacggtctggctacttatctggtaatcattatcagtttcaaccttccttttctgatggaagagtacgggctttccagtggcagggcaggaatattgatttccttgtttttccttgctatcatggcaccgggctttgtgctgaacaggatagtgcaagtgttggggcgtcgcatctatatggtttgtttgttgatgatagcttgtgggatgggaattattttgctcagccgttctgagatattgattgctttggggtgtgtcctgaacggtctttcatacggtatcatccagccgttgatttatgataagacctctgatgtggccgtacctcataaggtgacattggcacttgcctttgtgatggctatgaattatgtggctatcctgctttgtccttttattgtagatgcagtacagagcttgtttcattctgactcgcagacttttgctttctggcttaatctgatggtagccttgatgggtatgtttattgtgatgaagcaggaaaaactgagtttataagaaaaatacccacgtaataacagcatgaagtatgaataaacaagttgaagcaaaccttagcatggttgtctccaaagcgttgggaggccttaatatgaacgcattgaaatatcttttacctttgtggatagctcctgtgacaggggttactttccgattggtatttggggccgccgctttttggcttattgatatattttgcaaacccgaaaactccactattcgtcagaaatggcagctttttatgttaggggctttaggtatttacggatatatgtttttttatctgctgggtatcagtaagaccactccggtttccagttccatctttgtcagtttggagcctatatgggtattcattattgctgtattattttataaggaaaaagtaacttggatgaaagtgcttggtattggaatggggttgggaggagctattctttgcttttctacacaacctagtgacgatcttgcctctaatgctccgttaggtaatttaatgtgtttggtcagttcgctggtttatgccgtctatcttgttctcagcaatcgtctgttaaaaggggtgggaaatatgacgatgttgaaatatacctttttaggggcggctgtcatggctgttattgtcaatacaatttacggctttgatgctcctatactgagaatgtcacttttctctactcctatgttggtcttgctttttgttttggtattccctaccactattagttatttactacttcccctcggattgaaatatctgaaaactacattggtagctatttatggatatttaattttgattgttgccacggtgacctcttttattttggggcaggatcgcttctcatggacgcagttggcggcgattgttcttatttgtgccagtgtttatctggtagaggtggccgagagtaaaagtgaaaaacagattatatcgaaatccagataagacaccgggaaaaaagtataagaccctaagaaaaaaattatcgcggtgtgtaatgtaaagaaacttaccggcaaatgaatgagcgaaaaaaaagaatgcaactttacatcgaaagcgagtgtaaggaatcaattttatttgtagctttgcactcaattaaaaaacaagagtgttatacctatgctacaattagatgcaatatacaaggcggctcatgtcctgaaagaggttgtccgtcgcactgatttgatttatgctcctcagataaatcctgagagtacagtttatctgaagcccgaaaacctgcaattcacaggatcgtttaaagtgcgtggtgcttattacaagatttcccaattgtctgatgaagaaaaggcgagaggtgtgatagcctgttctgccggtaatcatgcgcaaggggtggcattggctgccactaagtgtggcatcaagtcgttgatttgtcttccagagggagcacctatatctaaagttgaggctacgaagcattatggggcggaagtttgtttggttccgggagtctatgatgatgcttatcagaaagctctgcaattacgtgatgaaaagggatatacttttgttcatccctttgatgacgagaatgtgatagccggacaaggtactatcggtttggagttattggaggaaatgccggatgtggaggtagtcattgtccccattggtgggggcggactgatttcgggagtggcttatgcgttgaaggctttgaaaccgtctgtcaaggtatatggtgtacaggcgttgggtgcggccagtatggcaaactctattctccattcgcgtattgagcgtcttcactctgtttccacttttgccgatggaatcgcggtgaaagagccgggaacaaatacttttgacttggttaatcagtatgtggacggaattgtaactgtgaccgaggatgagattgccgcagctattctggcattgatagaacgccagcggattgttgcagagggggcgggagctgtgtccgttgctgcagccatgttcaataaggtaccggtaaagggtaagaaaactgtttgcctggtgtctggaggtaatattgatgtgacgatattgagccgtgtcatcagtcgcggtatggcaaagtcgggacgtacctatgcagtaactttggacttgatagacaaaccggggcagctgttgggagtcagcaaaattatcgcagagcagggaggaaatgtaatttctgtacatcatgagcgaaatagtgagagtgcagatgtcaccggatgtgcccttcgtgtcgttatggaaaccagaaacgaggaacatatagcatccattcgtcaaaaactgttggatgcaggctatgtgataatgaaataaattatatactttacaagtagaaaggggggaatttaaaattttcctccctttcttgtttctaattttaatttctccacacaaaaaatcgatttttatagtgaaaatatcattttatacttcttagaatccaattaaaatcgtacatttgccgcagttttgtaatgtagagtttgcaaaaatgaccgatataatcaaacatcgtggtattgtggaaaacattgaaggttctcatgtgcgggtgagaatcgtacaaacttctgcctgttcggcttgtagtgtgaaagggcattgcaatgcatctgaaagtaaagagaaactgattgatgtttttgacatgaaggcatcttcttaccgcataggtgaggaggtgatgatttatggtaccacttccatggggatgcaagccgtattgctggcttttggtatccctttcttggtattgctgattactttatttatttccatgcgttttacggggggggatgagttaaggtcggcgcttgttgctttgtcagccttgctcccgtattaccttatcatatatgtatgcaggaataagttgagcaagaagttttcatttacgcttgaaccaataaaaaataattaataaataactaactaaaatttatggatttaattctggttgcagtaatttcgttgggagcgattggcttgattgccgcggtaatcttgtatgccgcttctaagaagtttgctgtgtatgaagatccgcggattgccaaggtgagcgaagtgcttcctcaggcgaattgcggtggatgtggttatcccggttgctctggttttgctggtgcctgcgtgaaggctgccgatgccggttcgctggagggtaagttatgtccggttggtggtgctccggtaatggagaaagtagctgccattttgggattggaagccgttgctgccgaaccgaaagttgcggtggtaagatgtaacggtagttgtgaaaatcgccctcgtactgctctgtatgacggagctaaatcgtgtgccatcgctcatgccacttcaggtggtgagacgggttgtacattcggttgtctgggttgtggtgattgtgtggaagtgtgtcagtttgatgctattcacatgaatcctgaaaccggccttccggaagtggacgaagaaaaatgtacagcttgtggggcttgtagcaaagcttgtccgcgtaagatcattgaaattcgtccgaaaggaaagaacaaccgccgcgtagtggtgatgtgtgtgaacaaggataagggagctgttgccaacaaggcttgcaaggctagttgtattggttgtggaaagtgtgtgaaagtgtgtccgttcgaagccattacgttagagaataatttggcatacattgatccggctaagtgtaaatcttgccgtaaatgtgaatcggaatgtccgaaaggggctatccaagctattaatttcccgccacgtaaaccgaaggtagaaatgccggctggtgaggctgctgcaaaacctgctgcaaaagtagaggcttcaaaggtggaaactccggaagcggtgaaagctgaggctccgaaagcggaagcataatcaaaattcaaagtaagtaaaaattaaaaagatataacagtgaagacatttagaattggtggagtacatccagcagaaaataaattgtcagcaggcaaagccattgaaacccttgcacttcctaagcaagcggtatttcctttgtcacagcatatcggtgctcctgctactgccatcgtgaaaaaaggcgatgtggtgaaggtaggtacgaagattgctgaggcgggtggctttgtttcagcagccatcttctcgtctgtatccggtaaagtgaacaaggtagacgccgtaatcgatgcaagcggttaccgcaagccggctatctttatcgatgtggatggtgacgaatgggaagaatcaatagaccgcagttcgacattggtgaaagagtgtgctctcacacccgaagaaatcgttgctaaagtgaaaaatgcaggtgtagtaggtatgggcggtgcttgtttccctactcatgtgaaactttctcctcctccgggctgcaaggcggaatgtgtaattatcaatgctgtagagtgtgagccttacctcactgccgaccatcgtttgatgttggaaaaggcagacgaagtactggtgggcgtaagcattctgatgaaagctgcaaaagtgaccaagggatatatcggtattgaaaataataaaccggatgctattaagttgatgactgaaaaagctgctcagtatcccggtatagaggtagttcccttgcaagtgaaatatccgcaaggtggtgagaaacaattgatagatgctgtgatcggtcgccaggttcctgctcctcccgctattcctatcaatgtgggtgcggtagttcagaatgtaggtactgcatttgccgtttatgaggccgttcagaaaaacaaacctttgtttgaacgcattgtaaccgttacaggtaagtctgtcagaaatccatctaattttctcacccgtatggggactccgatgagccagctgattgatgcggctggcggtttgcccgaagatacgggaaaagtgattggtggtggtccgatgatgggtaaagcactggttaatacagaagttcctatttgtaaaggtagttcgggtgtgctgattatgaatgataaggaagctgcccgtgcggaagctcagccctgtatccgctgtgccaagtgtgttaacgtgtgtcccatgggactggagcctttcttattggcaacactttcagctcataaggattgggagagagtagagaaagaagatgtaatgtcgtgcatcgagtgcggttcgtgtcagtttacatgtccgtctcatcgttatttgctggactatatccgtttgggtaagggcacagtaggcggtattatccgtgcacgtaatgctaaaaaataattcgacaaaatagtatggctaataaattaatagtatcattatcgcctcacgttcatagcggtgacagcatacagaagaatatgtatggtgtactcattgcgttgatacctgcgttgctggtgtcattttatatgttcggactgggcgccgtggtggtgaccttgacctcggttgccgcttgtgtattcttcgaatgggcgattaccaagtttattttgaagagagaacgctctaccatctgtgatggttcggctattataaccggtgtgttgctggcattcaatctgccttccaacttgccgctttggattattatcatcggtgcgttggtggctatcggtgtgggcaagatgactttcggcggattgggttgtaatccttttaatcctgcgttggtaggtcgtatcttcttgctgatttcttttcctgtgcagatgacttcatggccgttggttcaacaatggggaagttataccgatgctgaaaccggtgctactccgctggcattgatgaaaatggctgtaaagggtgatgtaaatgctttaggtcagttgcccgatacattaagtctgtttctgggtaataacccgggttcgctaggtgaggtgagtgcattggctttattgcttggcctgggatatatgctatggaaaaagattatttcctggcatattcctgtatctattctggtgactgtatttgtatttgccggtctgatgcatttggttgatccggtggcttatgcatctccgttggctcacttgtttacaggtggtttgatgttgggtgctattttcatggcaaccgactatgttacttcgcctatgactcataaaggtatgattatatacggtgtggctatcggtttcctgaccgtggttatccgtttgttcggtgcatatcccgaaggtatgtctttcgctatattcattatgaacgcattcactccgttaatcaatacttattgtaaacctaaaagattcggggaggtcgtgaagaaatgaaaaaactagaatcatctttgaaaaacatggttatcgtactgacggcgattactgtgattgcaaccggacttttggcttatgtcaaccaactgactgccggtcctattgctgaggctaatgcaaaagctttgagtgacgctattgcagttgtagttccggggtttgataacaatcctgcggaagctcctgaaactatagaattggatggtgctacttataaaatatataaggcaaccaagggtggcgaatttattggtgctgccgtagaatcttctgccaatggttttggtggcgctttgagtgtgctggtaggttttgacaaagagggaaatatcatagactattctttgttgagccatgctgagactccgggcttggggtcaaaggcggctgattggtttaagaaaggtgcaaaaggcgacattaccggtatgaatccgggacagggagcattggtggtaaataaggatggtggtcagatagatgctatcacagcttctaccatcactacacgtgcttttctaaaagctgtgaacaatgcttatgcagcatatagtggtcagaatgtggatggcgctagtggtgcaactcagcaagtgtctgaaactgttgccgaaaatgctactgcctgcgatgctcaatgtgaaggaaacgaggcatgtaagcaggtttgtgactctacagcctgtaagactgtttgtagcgataaatgtgatcctgctaactgcgataaggcagactgcaaaaaagtagaatgtcccaagcaagattgtaaaaataaaaaataaggaaggagcagactatgaataattttaaagtattgatgaacgggattgtaaaagagaatcccacgtttgtactccttttgggtatgtgtcctacattaggaacaacatcttctgccatcaatggtatggggatgggactggctacggcttttgtattaatctgttctaatgttgtaatttcggccattaagaatttgatacctgatatggtgcgcattccggcctttgttgtggttattgcatcattcgtaaccttgttgcagatgattatgcaggcatatgtgccggcactttatgctactttgggcttgttcatcccattgatcgtagtaaactgtattctgctgggacgtgccgaagcttttgcagcaaagaacggtcccgtgccttcattcttcgatggactgggtatggggctcggatttactcttgcattgactatccttggtggtgtacgtgagttcctaggcacaggcaagttgtttgatatcactatcatgcctgagcaatacggaatgttgattttcgttctcgcaccgggagccttcattgcattgggataccttattgcgattgtgaataaactgaagaaagcataacccgtaaaaagtaagaatatggaatatatattgatatttatcaccgctatatttgtgaacaacattgtgttgtcacaattcttgggtatctgcccgttcctcggtgtatccaaaaaagttgagacagctacgggtatgggtgcggctgttgcattcgtgcttaccatcgctaccattgttacctatcttatccagaaatttgtactcgatgctttcgggctggaatatttgcagactattgcatttatccttgtcattgcagcattagtacagatggtggaaatcatattgaagaaagtgtctcctgccctttatcaggcattaggagtattccttccgttgataaccactaactgctgtattttgggtgtagctatcttggtcattcagaaagattttgatttgttgactggcgtggtttacgccttctcgacagctcttggttttgctttggctatggtattgtttgcaggtatccgtgaacaattaagtttggtgaatatacctaaaggaatgcagggaatggctatcgcattggttactgccggtctgctggcaatggcattcatgggattttcaggtgtagacaaaggtttgggtgttctgtttggaatagaatagttcacttcatcgttaaaataaaccgattcagaagtccggagcacagcttcggacttttttattagaaagaaatccattgttcttgtccgtaaattcaatttttatgcttatttttgcattagaattaatagagagattaaatggctatgaccttgattgtactcgcggccactatggggaataaatatggtggattgaaacagctggagggaataggtcctaatggcgaaacaatattagatttttccatatatgatgccgtaagagtcggatttaataagatcgtatttgtcataagcagacattttgaacaagaattcaagaaactggtatcaggcaaatatgaacatgtggtagaagtggagtatgtttatcaggatgtggaaacgattcctgaagaaaagcgtaatccgaaacgcaaagcactgtacggctcggtaagagctgttttgatgggagaagagttgattgactctccattcggtgtgataaatgccgtgaacttttaccaaagagaaagttttgaattgttatatgataatctggtgatgttgggagaagctgactaccatagtttcaatatttgctacaggctgagaaatgtattggcggaaagcggaggggttacccgtggtatttgtgaagtggatgaaaagggatatctgttgtccgttacagaccgtgtaggagtagaacggataagtggaaatccgatgtatcctaatgaattacataaatgggtagctttggatgacaacagcttggtttcaatgaatatgtggggatttactccgcaggtatttggtgagatgaagaaggcgttcgataagtttatagatgagaatggaatggatatgaaagctcattattctattccggcttttatgaatgagcgtattgctgacggagtcagggtgaaagtgattgagacacctgccagatggatggggttggtatcgcatgatgacaagatacaagtcctgcttcgtatcaatgatatgatacgaaaagggatttacccgtcgaagttgttttgaacctattagaaaacgacagaatattaagtattatgaaagaaagaattttagtaacaggaggaaccggctacatcggttctcatacggtagtagagctgcaaaatagcggttacgacgtagtgattgtggacaatttgtccaattcaagcgccgatgtggtagataatatagaaaaggtttcaggaatccgtcctgcatttgaaaagttggattgcttggattttgagggaatggacaagctgtttactaaatatccgggcataaaaggtattattcattttgcggctagcaaggctgtgggtgaatcggtacaaaaaccgttgttgtattatcgcaataacttggtttcattgattaacctgttggagttaatgccgaaacatggagtagaaggtattattttttcatcatcatgtacggtgtatggtcagcccgatgttcttcctgtaacggaagaggctccgattaagaaggctgagtctccgtatggtaatacaaaacagatcaatgaagaaattattcgtgatacagttgcttcgggatcgcctattaatgctattatgttgcgttactttaatcctattggcgcacatcccactgcattaataggtgaattacctaatggtgttccacaaaacttgttaccctacgttactcagacagcaatgggtattcgtgaaaaactgagtgtgtttggggatgattatgatacaccggacggttcttgcatccgtgactatatatatgtagtggatttggcgaaggctcacgttatcgcaatggatcgcattttgaataacaagcagaaggagaaggtggaagtctttaatattggaacgggtaaaggcgtttctgtattggaactgatcaatacatttgaaaaagctaccggtgtgaaacttaattatcagatcgtgggtcgtcgtgccggagatattgagaaggtatgggctaatcctgacttcgctaataaggagttgggatggaaggcagaagccaatttggaggacactctacgttcggcttggaactggcagttgaagctaagagaaagaggaattcaataagaattaagatatttttagaaagaccgatgaacaaaggacgctagtgtggcgttttatagatgcaaataacctgaaacccctcttggatatgtgaatacctgattggcggtagttatgttactcaaaacatagagcaggctaaaaaattgcatagtagttttgtcgtgttttattttgtgtttgtgttgtggctgttctccgacgtgagtcgggggacagttttttttgactatttagttgttttttagttatttatggctatatttgtcgaaaataatcacgcactactttatgaaaacaaaattttggatcatctgcttatcagttttctttgtgtcttgcttgcgtaatatgcatgatatatacacgaggggaggggaagaaggggaggaaaaaatcaataaagacgatttttttgattttactactgtccgtaatagtcaacttattattgattatggtatgaaagtacagactgctttttatctgtatgatgaatatcctatggaattagttgaaaatacttgggagtttaaagatataaatcccatttatgctgcttcgactgatatgaatggtagatttttttcaaaagtatctttgccggcttatttgaaaaaggtatggctggtaactgataatgtgttggtcgtatcacctgttgaattggaattactatctgacggactaacctttaattatgttgattataaggcacaactgtctgccgatgggcgttctagagcagtaatgggaggagtgagttatcctgacggatatgatgtattgggtaattggaatgaaaatggggttcctgattatttgttgcctgaaaagttggatatacctggtgcttttttagagagatgcagtaatttaagccgttctatagtagtagataatcgtaatttgttggaaagatttccggaactgcgtacttcagggagtaatgatatggtaataactaaatctacaggtttggtagcgacttattttaatttctcgtctactacgtgggaggatatggttgcttattatacttataaagaaggagagtccgtggacatggctaccataaaaaagaccatcctgattcctcgttccagtaggaatgctcctaaatctttagtcggtgagcaaataaaactaaaatattggaataaggaacaaagcaagtatgaagatgaattcccccaaggcactcatattggatggattttattgggaatgggatttggaaaagaaaagggtgtttttcctcgttattctaatcctgcatataacgataataaagagcaacgttcagttttgttaagtgatccggaactggacaattgtttctttatggctatggaagataatgtggacatgcgttttaatgatgtacagtttgctattatggcatctgcttcttcttctgtagaacctactcctaatataccggatgaagtaaataagggtgaaatttcgtatgtagtcaaagggtctttggcttatgaggacaattggcctgataagaatgattatgatatgaatgatgttgtgatatattattccagtacagttgtgaaagataaatcttctaacgcattggtgcgcaccactactacttttactccgatgaatgatggtgctacttatacaaatgggtttggtttccagttggattacgtagggaaggagcatatcgatttggtgcaggtgagtcaagaaggtaatgtgatcggaaaaaactttgagccgggaatagaaaagcctgtattaatacttttttctgatataaagcctgttctcaaaaagcctgtgactgtagtgatcggatttaaaaaatatgataaagtaagcgatatggatgcttatccgccttacaattctttcatttttgtgaataaacgttctcatgaagtacatttgtcaggctataagccgacaagcgtagctgatgagagtttacgtggtacgggtagtgatttgagtcaagattccaatggtaccccaatgtattatatagcagaagataatatgcctttcgctataaatatcagtaacattgaatttagatggccttcagagaaggtgtctattaccacctattatcccgagtttaaacagtggagagattcttttggtgcggattataaagattggtatttacaccccaaagaataataaagggtgaaaagtactgttgtttttgataaatcagattaacaggactttttacttgaaaaaatgtcaccttttgaagccaagtgattcaatctttttgtacttttgcggacaatatgattttataaaggaaaactcacatggattcagtctttattacgacgcgtaagcaacgggttatcagagaactaagggattatatgttgattgctcttggtatgctgatgtatgctatcggatggaccgtctttttgttacctaatgaccttccttcaggtgcggtgccaggtattgcttctattgtttattgggctaccggtttgccggttcagtacacctatttgggaataaacggagtattgttgatactttctttggttattttgggatggaagtttagtgtgaaaaccatctatgctgtatttgtgctgacttctattctgcctatcatacaggatttgacagggggagagtctttaatacatgatcaacctttcatggcttgtgtcttgggagcctttttctgcggaggtggtattggtgtcgctttttctgccaatggtagcacaggaggtacggatattatagctgctattgtcaataagtatcgtgatattactttgggccgggttattttgatgtgtgatttggttattatctcttccagttattttgtattgcatgattgggagaaggtggtatatggatatgttgtcttgtttatatccagctttgtcttggatcaggtggtaaatagtgctcgtcagtcagtgcaattctttatcatttcgaagaagcatgaagaaatagggcatcgcataaataaagatcttcatcgaggggtgacgttcattgacggagtaggttgttataccggtgcgggtgtgaaaatgatgtttgtgctggcaaaaaaacgtgagtctactactatattccgtttgataaaagatatcgatccgaacgcatttgtatcacaaagtgctgtcattggtgtatttggagaaggctttgatagaataaaggtgaaataagagttccgaagttaaaaaatagaataagggcgttctgaatggacgcctttttttatgtctgttttttgaatgaacttcaaaggatataagactttgttaactgagtaaactttcataatgtaagtttgttgtctgttttgcagcaataaacatgtataaaataatattttaaaattatatcagattatattttgatatcaaaatgttagtttatacctttgctatataaaataagaaatgataaactaataaataacctgatcatggaaacaaaacttacagaagaaacccgagtagaaagtgatttaattggtgcccgcgaaattccggccagtgcattgtatggtgtgcaaactctaagaggcatagaaaatttcccaattagtaaatttcatctaaatgaatatccgttgtttattaacggtcttgccattacgaaaatggcagctgcaatggctaactatgagttaggtttattaactaaagaacaaaaagatgccatagtattggcgtgtcaggaaatcttaaatggtgagcatcatgagcaattcccggtggatatgattcagggaggtgccggtacttctaccaatatgaatgctaatgaagtcattgctaaccgtgctttggagattatgggacacaaacgtggcgagtatcaatattgctctcctaatgaccatgtgaactgctcacaatcaacgaatgatgcttatcccactgcaatccatattggtatgtattattctcatcttcgttttcttccttatttggaatcgctgattggtgcattccataagaaaggagaggagtttgcacatatcatcaaaatggggcgtactcagttggaagatgccgtacctatgactttaggtcagacattcaatggttttgccagtatattgagagacgaaattcgtcatttgaatgaagcggcggcagacttcctgacagtaaatatgggtgctaccgctattggtacaggcatttgtgcggaaccgggatatgcagaaaaatgtgtggaagcattgtgtgaaattacaggttttgatttcaaattgtcgtcagatttggtaggagctacttcagatacttcctgcttggtaggttatgcttcagctttaaaaagggtagccgtaaaagtaaataaaatatgtaatgatttacgtttgctggccagtggaccgcgttgtggtttaggagaattcaaccttccggctatgcaaccgggatcttctataatgccaggtaaggtgaatccggtgattcctgaagtgatgaatcagatttgttataaagtaataggtaacgaactatgcgtgactatggctggcgaagctgctcaaatggaactgaatgctatggaaccggtgatggcacagtgttgttttgaatctgtagatttaatggtcaatggttttgaaaccctgcgtacacgttgtgtagaaggtattactgctaatgcggaacgctgcaagattgaagtgcataacagtattggtgtagtaaccgcattgaatccgattattggttataaaaattctacaaagattgcaaaagaagcgttggaaacaggtagaagtgtctatgaactggtcttggaacatggtattttaaataaggaagagttggatacaattctaagtccggagaacatgttgaaaccggtaaaattggatattaagcctagaagataaatttatttcaccacagactacaggaaagtaaagaacttgttttatgaagccggcttcaatatttgtaaagccggctccatgagtgtggcactagttttattcctgccgataaattaatttctagaaatccggcatagtgttttgtcaccgctatagcgtataaattgttttttcatattttatcagcagatagtttgcgtagtctgtggtatacttttttagaactttctgaatgtgaggcgtgcataatcagatttcagaattagtttcttgcctgttgctttttccactttaagatgattaatagcttgattaagtccgaaaggtttcaattcattcagtgtcgttagtttttcttcatcttcccggtggcggaattcactcatggttacctcatctcctttataagagaaacgtccgatatgagtgcctccatttccacctttggcactgatttccaccaaatgtaactggatactataataaatgcggttacattcttctatttttccattagtatattctatagtcattaattgccatctgccatctaatttgccattgatgggagctttgtcacaactgctgattcccagcataaagagtatgaataataatatttgtttcatatgttgattgggttgacagttaaaacttttatttattgcctgatttgataattccttgtttgcggataaccagcattccaccataattatttccaagcatgctgccgcgatccatagctccggatacagtgaaactccatcctttcagttgttgtggagcataagttacttcaaacaaagagttgaattgtttctttatttcattcagaggattatcataagtaccccaatgacgggagtaggagagtagcatacgataactcagcgattggcagggggaaccgcagaatcctatgtgatgtgccagtacacggttgctgataaaagtaatctgtccattcttgttgtaaataggtccgggaagtagaggattgcctattcccattccccaatgctgccatccttgatagaggtaatgattgtaataattatctttagcactgatttgctcttcaaactccccccaaaaggaatcatacagcataggtccggtttgatcctttgttcctaatccttcgtatacaaaagtatcaatgaagcggttttttggaaaagttatttccagtccgatgtgtccgtctttccagcgtccgtattggaaaaacatttgggagtgatcgtcgaaataatgttcataatagatttttaccttccactggttaagataagctgttgcggcaaaattccaactaccgacatggtttccgtagatgtttacttgttcgccttcgggtgtggtatcatctccagccataggaaccaatacgcgcataaagtcaacaaaccgggtaggcatatctattacaggctctttttgtcctgcaatatattggtctccgccgaattgagcggacatttgtattcctccttcaaattctaccggaaaatgttctttgtttcctactttggcgaaaagcgatttactgtggtaaagtacatcaatggcatatttgttacctatggaagtgaaatgttcctgccatttgtcatcagtaaaacgtccataggctatgtgtcctttcaaataaagccatttatgggtacctggtatggctacataatagggaacttccaagcgtacttggggaatggggcgggcattatttgattctaccatgcctccactgcttaacttggaattctttaattcgggcaagcgttctttactgccgatgctcaggttcaaccatcggtagctaaggtctgcataggcctgttggatgatgaatgaggaggtgaaattgtaggcggttgccaaatccagtcctgcactgaagccgaaatgttggtttaatggcattgtgtgtgcaattcctgcccgtaaataaccattttcagtattgacagaagataaaccttgcctattggcagtaagccacataggtgcgtaagttcctttacccgatgttcctcccatctcaacggtatattctgttttgacagggaattgggcattgatgtgctgcgtaatggatattaacagaaatagtaataagaatagttgtattttcttcatttagtttatgtgttttggtttagtgtaaagtttgctaaaacgaagcagatttatcagtctgccatcctgaacttttgtgaaagatttggtttctaatcactttatgtatatgaaaagcttcactaatgcccagaatggcaaactatataatcatatcagcaaaagttttgacatatttattttcctccggcaggcaggtttttcaaccagtaatcagccattgtctttcgcagatgcaagctggttccctcgccttcataaattccatgggaacgcatagggtaagaaatctgtgagaagatctttccgtgccgtaccagttcattgaccaacatttcacaattctggtaatggacattatcatctcctgtaccgtgaattaacagcaagttgcctttcaatcctgctgcatacgagatgggagaccctttgcggtaaccctccggattattttgaggggtattcatgtaacgttcttgataaatcgtgtcatacagacgctggtctgccacaaaagcaatggcaatgcctgtgtggaaaacatcgggataacggaacatactattcagagtctggctgcctccaccactccagccggtgataccgatacgtgtggtgtcaatgaaagagtattgacgtgccaagtcttggatgcctcttgcctgatcttcactggcaaaggttccgacttctccataaatacatttgcgccattcgcgtccacggggtgcattggcaccacggttctcgatgctgactatgatataccccaggtttgccaagtattggtgccataaacttcctccgctccatacatcctgtacagtggcgttggcaggttctccatagacatcaattatgaccggatattttttgctgggatcaaagtttacgggtttgatcatccatgcatccagttccaattctcctgaacgggtttttacaaattcttttggttgtagccccaaggctttgtattgctccttggcttttgcattgtcagtaatcagacgtacacttttatgggcagggaaagacaccatgtcgattacagggggagtttccgagttactgaatgtatggactgcccatttgccggacggtgacatgatataacgatgttgcccgctttggtcaacaggacttagccgctttacctctccattgccgaaaagacgtgcctggtagagatagcgctgggtgaagttgtcgggagaagcgataaagtatacaaaacctttatccatatccgcacctacttcttgaatataatcaaaagctccttgggtgatgggcttgatttctttaccatcacggcttacacgatacaggtggcgccatccgtcacgttcgctttcccaagtgaaatacttgttccctttcaaccaacgcacattgtcattcgtttccaaccatgcggcatcttgatcggtaaagatattgacgggggtattttcacctattttcgcaatccatactttattggtgttttgggcacggttcatttgctggatgaacagttcgttgcagcccggaatgaattccatacggggaatatagtggttacgtgcatcaccgggaagagccagccaagtggtgtttccaccgtcggcggatacatagcctacttttacagcggagtttgctgttccggctttagggtaaggaaaacgttggattttaggataaatggaatctacattattgatgatatcaaaccatcccgtaccttgggtatcgctttgccaataggctatgtattgtccgtcgggactccagcggaaaccgtcgcggcagttgaattcttcttcgtatacccagtcgaatgttccgtttacaatttcattatttccgtcttgagttagttggttgattttcccgtcaaccagactctctacgtaaatgttgtttctggagacatatgctacccggctggcatccggcgagaacttggcgaacattaaggtagcttccggcaagcttttgcccaattgttgcagtttgccgtttttcaaattaagcacccagtaatcaccgcgggtatcataacgccatacgcgacgagtattggtgtagatcaatactttggagttatcttcgctgaatatgaaattgcggacagagataggttttcctgtttgcggattcagaagcatattggcagggatcagcacttctttggaattgtcctttgctttataggcagtgacttcgtatgctccctcggcatttttttctattttggaataacgttctccatttttcatccaactcacgttgcttccgccttctgtcttgatcagtcctccgtatacagcttcctccaatgtggggatatgttgcgcatgagttgtggttccgagacagaataaacataagactaatgtaaataagttctttttcgtcatagttattatgaatcttttactaaaaaatagatgtccatttgaaaacacaagtatgtattgggaatccagatatctgttttcaaaaaacgggcgtctattttagaaaaacggacgcctgctcttttcttttttatttaattcctaatttctgtttgattgcagccggaatagcatctttatgcaccatgaggaaaatagtcttggcacgtacatagctttcggacatattcagataaccgccaaatgtattgcgttctgtaccccaagaatttttggtgatatagtatttggtcccgttctggtctttggtaataccggtaagatgcatcaggtggtcatctgtagtgacaaatgcttcataaccttcctgacggacttccggagtgacatttacttcgggacacggtttttcaaatttgtaggcttccgccagcatctctttttgttctttagggtccatcttttcaaaacgtgcacggtcggaacccgagaggtcttccacttttttcactaccggattgatggctacaccatttttgaatgaaaaacctttttcactgacatcaccgtcccaacatacggtatatccgtgggtcaaagcatagtcggcaacttccatcatttcgtccagcggaagattgtacatttgttcattttcccagttgtcgggtacttccggagagaatttctggtaatacggtttgtgagtgaaactagtcagttcaatataatcgtccatgttcaaacccagactttcggcaaaagatttcggagtgtattcttttcctttgtaagtgaacttttcaggaagttctcctagataagtatcgaaaagattgttgatcagcttgtagtattccgcgctgcgacgtttcattttaacggctgtgtttcctaaagcgttgatgtatctcaccatttcaccatggttatgtttctctgagttataattgattccgtgatatacttcctcgggtacgatacccacttgattgaaagcgttcttccatgtgtgtgaaaggcttccttgtcctaaattcccgttgcctccccggtaatagttgtcttccaattggtttaagtacttttggcgtacaatgaacatttcagaaaggtcatattctcctttgcccatacggagcagttcggattccatgaacgaagtggtggcaaagcaccagcaagttccggtagaggcctgatttttgacaggagttgctttctgtgatgcaacagtcgtgaatttgtaaccactttcttgtgcatacatggctgatgcgcagcatagcagtgcggctagtgtgaatacttttgtcttcataagtttgtttttaatatgataaggttaacaattaaaagccgaagcgtgactcaatccaatattggtttgccatttcgtcccagcgaaggatggtggcgcctataaagtctgccgtatagtctgtgagataagcacgggcggcttcttctcctttggattgaaggatactttggtattgtgcttccacaaatggaagttcccgttgtcctttttcctcgaaatgacgaatatttttttccattactttacgggcagctccccatcttacagcagccagtttgttggcgcggcgatagtgccataaggcggcatcgtcgcgatagcggtggttaccgcagattttatacatagcagggaaatcagtaatgccacagaataccggaacgcgcgggctttgtccgggattgtccatagagaaccataccacaccacctactgcatcgggcagccagttgcgcaattggataactgtagaataagcacattgcggaactgcgatattgcgtactgatttcacaactccttttttaataccgttcagcatattcagttcatcgccacgcatccacggattggctttcgggctgataatggtgtctacttttccggtttttctatcttttaccgtaactttcagattctgtgtcatatccagcggcgttccttcgtatgtttcccggagcaatgccataacatctgttacagatacttgcttgtcgggttttacactgataggcagttcttctgcttcataatcaagctttaatgacggtgccagtgcattcaggataaagtgctcgcgggtgctgaaggatttcagttggccggagtaattctttccgctataggctttccaaaatttaaaaggttcttttccatcccaataccctaattttttagccacgtcaaatacattttcggaagccatatagtggtcgggatctttcagattgagggtgctgatccgtgagatattggcagatacgcctacatgatcatccggaatacggactgccgcccatactccgccaattttatcttttccttctccgaaaacttcgaaatgccatacttcattaggatcggcgatggtcaggcattcaccgctgtcgccatagccatattgttttacgagatctcccatcaggcggatagcctcacgggctgttgtacagcgttgtaacgccacacgttgcaattcttcaatcataaacatacccttgggattttccagatccctgcgtccgcttacggtagtttcacctattcccagttgcttttcgttgatacaagggtaggaggtgtccatgaaggcatatgtttttctcgcttgtggtatttgccccttgatttttacattagtctggtcggctacaaactcggtgtgcatacggccatcgtaaatattcattacagtatccctttcataactttctgccggaaccatgtttacccaggttcggtaccagctgtcgcatgtatgactggttataactgatccatcggtagttgctttctttcctaccataatgctagtgcagctttctggatcctttgtgtaattcgtttgggctgtgacactttgtgccatgactaaacccaggattgttaaagaggctagtagtttcataaaggtcgttttattactattgcgtttcaaaagtatataaaaaaaactattattcagaacattatcggcttaattttgttatttgtatctatttattcggcctttttttgtatttttgcaaaaaatacaaaaattgggagcacatgacaactagtatagacatagctagaaggatagcagaagttaaccatcctctcagtagagaaagtgttcacgcattagccgaaattttagtttgtagaaaatatcgtaaaggggagattgttttgcaggccggtgaggtgtgtaaagcaatgttgtttatagaaaaaggaatgctcagacaattttattataagtatgataaagatctgactgagcatatcggttatgagaacggaatgattatttgcatagagagttattttaaacaggagcccacccgcttgatggtggaaactttggaagcatccgtggtatgggagttaccccgtgtggaagtggagaaattgatagatcaatatcacgatatcgaacgtctttatcgcagctttatcgaacattctttgatagagtcacaggtaaaggcggacacacttcgttttgaaccggctcatgagcgttataacaaactgttgcaacttcatcccgagatattgaagcgtgcgcctcttgtatacatcgcttccttattacagatgacccccgaaaccttgagccgtgtccgttcttcattgctttagaattgataaattaatcctaatcgggtttcaaaggtcttatatcttacgtcctcatggtaggaataatgtgtgtggcggtagtaataggacacttccatattggccttgaagtgggaacttagatttagctcgataatcggattcaccacagcgagcattacatttcctttgtctccctgcgcattcagatagagcggatctattgtttccaaatctttatgttcgtatcctttccaggtaaaaatttggtaaagatgcatattcagtgcgaacatgccataacggccgaaatccagaatggtgttgttcttgatgctgtatccgcttcccatattgtaattgcggtctattacgttgtaatagtcggtaaggcttccacccagcaggatggcactcaggaatacacgttgctccaaatttaccagactgttcatttgagggaatttataaatcatacccggtcccacactggcagcttccgaaatcttgtaagggatacgtcccgatccgtcaatcacttcctcggaatcaaaatagttgaagtgctggaagataccgaacatcatttccatgccggtagtggttttcagggggacaccccatagtttgcccatcaggttgatctggctgataagaggctggttcccggaaagaccgaaggtggcccgtgcggtgaaataatcgtatgggccgtcattcactttatcgaaagcatctccgtattgtacccggaattcaaggtagggattgtgctctccacggaacaggtaattgtcgtcggccagataacggtcaccggcacctatggaaaagtgtaccggaatgcggtcgtaatcgtggtatttgtaatgagagcgttttacttgccacatctcgccggttatcattcggttcaatccccgcatggggcagatcagggttcccaaaaactcgcgggtgaaacgtgagaaaccacgcttggagtcgtccagtaccaaagaagacatacggtgcgttacttctcccagggcgatgccgcctagggtggttgccatcaggtcattgatggcgggcggctccacttctgcggctatttcccacatcaaactaccagcaaaggcgtatggagttgattcccaaaaggtaagtccgttgctgcgtgctgcattgaaatagagatttccgtgataggggtgggcgaacaggttggtggagaattggtcgttatcccatacaaaaccatgcttgatattgcgccgtatgctgccgatactgattttggcaaagtcttcgttcattacataacggtcgaatgcccatactccgacattcattccgaaagtttcggcagcggcacgccaagggtgttttttttgcaggcgagggtcggtgaatgtataaatggaatcggagcggtggagtatctgggctgtgacattcccagcacttaatgccagcaggcagactaatgcgatatgctgtagtttcatattgtatgaattagtttatactagtgtgacggctgcttaaaataagataacacctgcttcgaaaataggttttttttcgtagaacttatttttatcatagtagcgcgtcatgccgtaaccacccgatgcaaagaaactgattctggatttgaatttatattccagattgatacgggcttgtaatgaatacatgcgttccggtgtttccgcatcttcattttcaaagttttctatatggaaataacctaagtcgccacttagttccagtttggaggcgatgggatagtaaagaccggtacgatagaacacacagcccgaaaatttgtcattcaaatccagatagtgtgtaccgatacccagcatagtataactccggcggtttttaaaacgcacggcagcattcagtttgctggtgttacctgcaaacagcatcatctggatacgggttttaggagtgatattcaccaaacctagtttatgggcggtagtatccttgctatggttgatgattcctatttgtatcccttttacattcccgccgcacaggttgagtaaaccgatttgcgcaccgcttacttctccggcatagttgccgggagcgaactgcacaccgcgtaacttgccttggcaaacattggtcagtcctgagaattgcagggcattttccgtcttgacggcgatatttaccgcaccacaaagctgcaagcctctgatttctccggcagcgatattgctgatggcggagaattgcataccattcacgtttacacctacattaccaatggctgagacttgagcgcctttggcttctccgccactgatattgagcagggtggaaacttgtgctccgttcagtttctcggcagatacgttcataagtccgccgatagcgacaccattttgtgattttccggcaatgttggccaagccggctatctgaactccttgggctttgttgccggccagattcatcagaccgccgatggtaactcctcttgatatgtttccggcaatgttgcctaatccggaaaattgaataccgttggctttccctccggcaacattcatcagtccgctgagcataatgccattggcattgcctccggctacattggcaatacctcccagttggaaaccggaggcgtggcgtccggtaatgctggccagaccggagatttggaaacccgtcatatcgttttgtacaacactggacacagcgttgatgccgattcctttcagttgatagatatttgtaagcagaccgatattcagataagtggttttgacactgtctttcttcgcggaaatgttcaaggagatgttgggaccctttttaagcttgtcctttttctgggcaaaagcaggagttgacatacctgcacaatatcctaaaaggagtattgctgctatacgcatattcattttcatacatttttagtttcttggatgcaaatgtaataaaaatgtagatataagggggaattatggggagaattgatcggggtgaaagagtaaaattatgttttgtattgtctcctttcacgtatcatgatccaggtgcccatatatgcggatgtataacctgtaacatatataatgtatagcctgcaacatctataatcttcagacttatacattatatatgttgcaggcaggttcttttttctgtcaggtgttattttacttcctgatataagaaacgtttgatactctttttaggagttttctcgaattcttccggatagatttttacacgggctatttgtgaatatgcaggaagttctgtattcaagttgatacggttctcttccattgcctgtgttatcgcgtcattatccagcccatgagcaaaggcatcgtcgaaatcgggataaaccaaagccgccagtttgctgtctgcctgctgtatgataatactttctgaaacgaacggcatgttattcaatttatcttcaatctcttccggataaatattctgtcccgatggacctaacagcatgtttttgctgcgtcccttgatggtaacattgccttccgcatccataacacccaggtcaccggtatgcaaccagccgtccttgtctattacctcggcggtagcttcgggattcttgtaatagcctaacattacattaggtcctttgcatactatctcacctactatattctcagggtcggggctcaatattttgacttccatacggggagccgcctttccgcaggaccctagcttgaaatatttccaatcttcataacagataattggagcacattcagtcatgccatatcccacggtataggggaaatctatacttttcaggaactgctctatttcttgattgaaagcggcgcctcctacaataatttcgtaaaaattacctccgaaggcattaatcatctgttcgcggactgtggctttgattttatcattgatgataggaactttcagtaaaatcttcatagccggggtttccagtttgggcagtacattcttcttgatgattttttcgataatcaatggaacggctactaccagattgggtttcacttcggaaaaggcttggaagatgattttcggactgggggtacgggtcaggaaataaatatggcatcccacacagaattcataaaggaactcgaaagccagtccgtacatgtgtgccatagggagcatggaaaccagcttgtcacccggattcattttcaagacatcaaaagcgaactgggtattcgaccacaatgcgcggtaaggaatcatcactcctttggaataactggtcgtgccggaagtatagttgatcacagccagttcttccggtgtatcccggcggtagctgacatgttcccggcggaaattgcgcggatatttctttccgaacagttcattcagatgatcgcgtgcatagtccaatttggaactgcgggacactagcagggtatagtcattcatcaagataaccccttctaacaacggcatggcattttcattcagattctcccataccatatcgcctaccattaacaggcgtgcttccgagtgattgactatattatgaatgttgtccgatttgaattcgtgaagaatgggaacaatgactgctccgtatgtaacggcagccaggaaggtaactccccaatgagaactgttgcgaccacagacagctatcttgtctccttgcttgatgccgcttaattcgaagatgatgtgtagcttttctattttgcgggctacatctttatattgtaatgtggcacctttataatctgtaagggcatccaaatcccagtttttctttatgctgtcttccaggaaggcaataaaactctgctccattgtatatactcttttgtttatattttgcacaaactttaatcaaatgtgcaaatataagactttctttggagcatacaaattaaacagagggaaaaaatagtggttagtgattagtagttaatgggctgtgctgtgataccgcatggatatgaaccactaaccaaccaattaatcactaaccactatttttcattctttactgctgaaatacttcatgaactgtgtacgttcaaacggattgctggctccagtagacagcgcgttcatcgaactcttgaattcgctgatattcttgtagccctgccggttcatccattgagttatttcatttgtcatatctgcaatgacctgattgcctctttggtagatgacactgcataattctacagccgaagcgcctgccaggattgctttgactatcgcttttccatcgtgcacaccgcctgagatggcatagtctgtctgaggaacttgtgccgaagcgatagcagtccagcgcagtccgttggacaagtcggcaggagtactgaatacatcgcctgcagaatatgtcatagtgtcgatattgatgtccggctggtagaatcggttgaacaataccacagcattggctccgttggcataaagctggttgatcagtgcgatggggttggtcagattgctgcccagtttcacaatgacggggatggaaatctgtttcttgatactgcttacgatatcgatatgacgctgttcgaaagaaccgcattgatattctttttcggtctgcaaggaaaggatgttgatttccagtgcgtcggcgcctgctgtttccacagtacgggcaaagtctgtccattctgagttgctgaaacagttgatgctggcaatgacaggaatggtgcaaagctttttagtctgttcaatcaatgaaatatattcgttcaatgcatgagagcgtacatatgtgctcaagtagtcatctccttcgggagaaccataagtagccatgtgatgtgcttccatcatgatctgctcttcgaaaactgatttcaaaacaatggctccggcgcctgccagctccagtttcttgttcttttcagcgctgtttgtaaggctggaactgctgataataataggattgcgcagtgacaacccggcaaaagtggtttttaattgagtcatataaatagtagttttaatagtttcgttctccaaagattttgcttcctaccctgactagtgtacttccggcttccaccgccagcggataatcgtgtgacatacccatggaaatttctttgaagtattctgaatcagaaaaatagctctgcttgatttctttgaagaatgtatttaaggaacaaaattctcttttgatttgttcgtcgtcatccacattggtcgccatacccatcactcctgataagcggacatttttcaaatccttccatccgcctgtatccagcatttccctgcattcgtcaaaagagaaaccgaatttcgtttcctcttgggcgatatgtatctgcaataaacaagggatgacgcgatggactttggaagcttgtttattgacttcaaccaataatttatacgagtctatggcatgtatcatagctacataaggggccatgtattttactttgtttgtttgcaggtggccgatgaaatgccattcaatgtctttgggcagggtttcatatttctgagtcatttcctgcacgtggctctcaccgaaaatacgctggccggcagcatacgcttcttccaatgcctcgttgggatggaatttggatacggctaccaggcggacccccgtaggcagttcggaaagaacttcttttaaatttgcttgaatgctcattatctgttatactttctattttttatcaggctttattcggtttttccggcatccggaaattcaggtttcacatccggttcggcttcgtatgggtaaacatccatgatggcggtttcggctacggatgcaatcacgtagtctgccattgtacctttcattccttcgtccagtttctttacagcgtcgcgcaggtcggaagcttgtaccagtacggtagtggaggtctttttttctgctccgcttttttcgtccagcgtgatgaagaacagcttgcacttaaaccagcggtcggctgcatcttcttcagaggggaacagttcgctgtagttggctcgtttgatgtccgaaacagtgaactcaccgctgatatacggagtgatttcttcaataatacgggcttctgcttcagtaaagctcagcgcgtcaaccaaatagggttccgttactttcttgttcatgccgttttccatgactttttcgtaacgtatcttacattcaaaccaagtatgcatcataaaagtttattgttttattgaatattaaattggatacaaagatacaatttatttaatcttcatctcccattttacttaatttcttcatgctttccttattccactagtttgcagctgttcaattgcatgaattcgtgaatcactttttcatgatcgcccattaatatgatgtgatggttacctaaaggattacgcataaaatagtctaccgatttgtccagtttgattcttgcttgtgtgcggcaggcattgatgtagttggtattttctatcagttggcctgtggatacgaaatactcgtccaggcattctcccgcgcattttatcatcgtgatgcctcccggatgcaaaataccctgtatggctattccggtttctgtttcaaaatgattccggatgataaactgatccaccattttggtggcaatcgtacagtgagccatcactatttcgttcaggtcatcgttgatgaatgccggattcgccatgaatcctgcctggccggtcagtgttttggcgatgagcagagtaaagatggattgtaagtctccttcacatccggccggaatgccttcatcattaagcagggcaagtgccagacatccagttgttcctaatttctcaatcagggagaagcaggagagggttactgcatccagcttttttttctcgcaaataattttcactgcctgataaagacgcatggctttcagcaaatcttccggagtcccttcccggcaggcaatggcacggttggcaaatacggacgcctcatatcctatatcatcatcctttatctgataaaaaagacaatacacttcctccatggggatatcaatgaactctattccccagcggcgtctggcaagcaggtaatctacattgctggccaccagccacggagaagaatatcccacaactccgattcgttttcctcttacctcgcgctgggcggcgaaagccttgtgatgatctatcagttgtctcaccatattggggatagtgccatgaataatatgtactttcattcctttgctgcgtatccatgtagctatttccagggaagcagccagtgagttctgttgtccgtcggtcagcagatggataggatagggaagtagttcgaagtgttgggtgaccattttttctaccccgcccgaagcgatgaaagccatccggtaggcatctgccggaatacttgcagcctctgtataaggtaccagatgaagcgtgaaaaacttctcgatttccacaaataaatctttatggcaatcatatacagactcaattctgttcaaggaggactggaaggttatcaggtatagattcatttgatattttgctttgttttactggaacaaacttacatgtttttttttaataaccctaaaaaatgcgcattaagataacaaagatttaaattcttaattaattgtttgctcggttggttgcgaaagtctatctttgcacttcgattaaataatttttataacattatgccaataatatccatcagaggaaacgagatgcccgcatcgccaattcgcaaattggcaccgctggccgatgctgcaaaacagagaggagttcatgtgtatcacctgaatatcggtcagcccgacctgcctactccgcgagcggcccttgatgcgattcgtaatattgaccgtaccgttttggaatatagtcccagccagggataccgcagctatcgcgagaagctggtgggttattataagaaatatgacatcaacttgtctgccgatgatatcatcatcactaccggaggttcggaagcggtgctgtttgcttttctgagttgcttgaatccgggagatgagatcattgtgccggaacctgcctatgccaattatatggcgtttgccatttcggcgggtgccgtgatccgcacggtgacgactaccatcgaggaagggttctccctgccgaaagtggagaagttcgaggagttgataaacgaacgcacaaaagctattctgatctgtaacccgaataatccgaccggctatttgtatactcgccgcgagatgaaccagattcgtgacatggtgaagaagtatgatctttacctgttctcggatgaagtgtaccgcgagtttatttataccggttcgccttatatttctgcctgtcacttggaaggcattgaagaaaatgtggtgctgattgactcggtgtccaagcgttattccgaatgcggcatccgtatcggtgcgttgattaccaagaataaggaagtgagaaatgccgtcatgaaattctgccaggcacgtctgagtcctcctttgatcggtcagattgctgccgaagcttcattggatgcccccgaagagtacacacgcgagacgtatgacgaatacgtggagcgccgtaagtgcttgattgacgggctgaaccgtattccgggtgtttattcacctataccgatgggtgcattctatacggttgccaaattgccggtggacgacagtgaaaagttctgtgcatggtgtctgtcggaattcaactatgaaggcgagacggtcatgatggctccggctgccggattctatactactccgggtgcaggccgtaatgaggtgcgtattgcctacgtgttgaagaaagaggatctggtccgtgcgttgttcgtactgcgtaaggcattggaagcatatcccggaagagtagaagactgatatggactggaagctctttattgccagacgcatctatcgcagcaatgagggtggaaaagaggtgtccaagcctgccgtccgcattgctatgctgggcatagctatcgggctggccgtcatgattgtgtcggtagcggtggtgatcggtttcaaacatgaggtacgcgacaaggtggtaggcttggggaccgatatcgtaataactaacttcgactcccagcaatcttatcagacggttcccattgtagccaacgacagtttgctccatctgttgaaaacactggaaggagtaaagcacgtgcagcgctattccaccaagccgggaatgataatgacaagcgacagctttcagggaatggtgctgaaaggtgtttctcatgaatacgactggaggtttttaaagaatcatttgcaggaaggggagattcctgttttctcggatactgcctctactaataaggtattggtgtcccgcactattgccgacagactacatctgaaactgggtgataaaatctatacctattatatagaggacaatgtgcgtgcacgtcgtcttactgtagccggcatctatcagaccaatttttccgcatatgatgatttgtttctgataaccgacttatatacggtgaaccgtttgaatagttggcagaaagggcaggtgagtggtatagaactggaagtgaatgagtatagccggttggagtcggtgaaagaggaaatccgtgcacgggtggatacgcaggtggatgcatacggaggtacttactatactcagagtgtggaggaagtcaatcctcagatatttgcatggctggatttgctggatatgaatgtgtgggttatcctgtttctcatgacgggggtggcaggattcaccatgatatccggtttgctgattatcattctggaacgtaccaatatgatcggggtgctgaaagcattgggtgctgataattttgctattcgtaagatattcctcagtttttcggtattcttgattggcagggggatggtatggggaaatatcatcggggtggcattatgctttattcaatctcaatttcatcttttcaaactggaccctgccacttattatgtagatcgtgttcctattgaattcaatatttggatttatttgttgctgaatgtctgtaccttgctggtatcggtgctgatgcttgtcgggccgtcatttctggtgacgcgtattcatccggcaaaatctattcggtttgaatgagaagattctctttctgctttttccgtatatccggtattaatcctttttttcttataatgctaaggtctttttttcttatgattaagtctttttatgcggtaatgtactacagtttcctacagtgaatcgtatagtccattatagtggactgtacggtctgatgtaatggactgtacagtctgttgtgaaagtctgtagtagttgatagaaagaaaaggcttaattgttaggaagaaatgctttagttgggcggatgtgttagaaccaaccctgctgcgaattcgtgacagggccggttctttatagagagaatgtaaagttatgtatagtatgtcacttccttcagcttacagtttgcaaaagaaagaaacgaagaaaggcatgcttatgtttatcagtatgccgtggacgatggccacgggtacggcttccggtccggagcagcgtgcgatggctgccagggaaatgtcggaagaaccgatgcccgccgccgagataggtgccagataaccgaaatatttgcggaaaaggggagctcctatcaaggcggtcatttcccggaagatattggatagtagcgcgatggtccccaattcggtagcaagctgcacaccgatggagggggatttgatctgcgtgataaggatggaggaaacggaataataggagaatccgcttccgacagccatgcagtcgaagatactccagcggctcaagagaaagcctccgatagcggaaaacaacagagtaccgcttacggtggcaaagggtacgagcagtgtcctgaaattgagggataaaacaaactgcctgaggttgcggttgcttccaagattaatgccgagtaacagcatcagtacatatagtacatatacagaggtttggtgtacgtcgaagtccaccgcatagctgactccggctacgcagccaaacaagaaaaaggctagagttacaagactacttttcaccgtttgccccctttcctctgaaaaagatgcggtatactgcaagggaggccatcatgctgcccaatatgcttaatgaggagatgacggctgcctggccgcagaagtaaccaagattgtcaataatcagtctgttaagaccaatagagagacttagtaagaaaagtagcagacagaccacgatatggatgagaggagtgatcttgcgtatttgggatttatggcgtaagggatagcctataaggactccgacagccattatagaaatgaaagtaaacatgagattcaactgtttttctgattttacaatactacttataacacgcttctagacaaacgcatttacggtatattggtaaagttgaaagaacggatggaccagattattttcatacttatgctttcaatttgaaactttttattgtttttaaaacgggtgcaaaagtagagtaattgtctttaatatgcaaataatatacatattaaatcttattgaagcgaaatatgatataaaacaaacaatattggtgatatttcgttgtaaaaagaagattttaaattgttacatttatagtttgaccgaataatattgcatgtgcatgggtgggtgaaaacaatgaaaaggggctgttcggggtgtgttagagaatataaagcgataaaaggtttcaatttgttatgctggataatgtgatactcttctattttttcaggcagtgattacattggtggaaaagtgtttcttgcataacctttcttggcggataaaaataaatcagggcttgtttatacaaaccctgatttgtttttgtcggatcaagatggataaccggattagaattcaaatttttctaatttcatcttgcccaattcttgcaatttaggaaccaaggttataaaatgtgcagccttttcgtgtgcatccagtgactcagcatctttccatgtttcgcaaatcataagtacatctttacgtgtcgcgctctcaaaaacatcataagcgatacaaccgttgtcgtttaaagattgtgctaccaattcctttgctgtttctaagacagcattgcggttactctcgtttacttggataaaaacatttaatctgatcataattcgtattattaaattaagaaatgtatagttggtttcattctctttttattttctcataaactcatttttccgtctgaatttacgttgtaatttgaataccccattccatgcaggttgcagaaaatcaaataaggggagtagtgcacagaacttccgttcgccaaaaactttggcggtttttctgaaaacaattagttgcatcgtgaagcgtgctaaccatagcaaaacggcaatggctgcaatagtccattggtggagaagaatactgatggttatagtggcgatgatggctgtatagaacaagaatctgctgcaagtttcaaatcccatgagataacgggcggttccatgaaataaccggctggtagccgcatagcttattttctcttcacaccatattcttttatatttaggcatggcgattcgcatcagactttcagggctggcttcaactcgtgtattgtgtgcacgggctgtttcattgataaacaaatcatcttctccacgttgcagattcaggtgggaggcaaatcccttctgcttgtagtacagcgttttccgataagccatattccttcctgtacccatgtagggatgtccggaaacagccatacccaaataacgcatagaattcagcaatgtgtcgaaagtgattttcttattaaaccatcccggtactttttcgtagttgctgtagcctaaaacgatttcggtggcaggtgtgaaattacgtgccatctgtttcagccattgattgctttgcggacggcaatcgggttcggtaaataccagccattcatgacggctggctttaattcccattgttattcccagttttttgtggctgatatagcgtgcactgtcggggataaaggtatgatagagattggggtatttgtcttccagtaatttcaacgtattgtcacaatcatccgccgggcggtcgtaaatcacaatcacttcgaattccggatagtcctgctctaaaataaatgggaggttttcttgtaattcgtgggtggcgtcttttgccacaataatgacagacagtggaggattttgagtatttatatcagtggcatatgctgtttctctgctgtgagtgtatagtttgttatatagccctagatagtaaacagcctgcgtgataaacaaggctcccgaagctattggtaagattgtatctatggtgaatagttccatgtgtgatctgtattaaaaacgtgcaaaaatacagcaaataattgaattgtagcagaatgaatattctttatttattcaaaagctcagatttaattataatttaatgttaaaagtgtgttttcgtgaatatttttcaagtataattgctatatttaaagaagttaactgaaacctgtaacaagtcctgaccaacgggcaattattatgagaatacaatttgagattaaagaaagtttgatcaatatacttgatcagcttatgcattccgatttttgggctacggaaatcaaggaagatgagtcgggaaagaagattatcaagattaaagacttggcttataacttagaagccgtggccgaggtgatggggaatgaaatttttattaaaacagctttgtctaagtacacttatcgtatttatgaggtgaaaggggagtgttggtgtgagtatgtgggggcctatcgtggttttttggaacagaagctccttccaataattactccgaaggaaaatctgttggaatgtgaggtgctggatagttctatattaggaggtaagcagaaaactttgcgtgagtatgcggaagataatttaaagctaaagaaattccgtgaacagaattttggtaataatggattctcaaaagcggatcatccgcggcgtgtgtatgatgaatttataaaagaagatttcattccggaagataaataagaaacagcgccgctttgtatcaaagcggcgctgtttcttatttattcaggcagttggagttggtttatactaactcttctgaagtatatcctttgggcaatgcacgacaattgtaagccgatgccataatttcaccatatgctcctgctgaacggagagcgaaaaggtcaccacggtgtgctttgttcaaatcaatagctttgccgaatacatcggatgattcgcagatggggcctaccacatcgtaagtttccataggttcttccgaagtgatattttctattttgtggtatgcctgataaagggcgggacgaatcaagtcagtcatgccggcatctaatatggcgaactgtttgttggctccttgctttacataaatcactttgctgataaggctgccgcactgtcctactacggcacgtcccagttcaaaatgtaaagtttgctgggggcgcagtttcagatgcttgtgataagtggcaaagtattccgtgaagttggggatggcttgacggttggggtgtgcataatcaattcctaaaccgccgcctacattgatatgttctactatgatttggcgggcatagagtttttcctgtagttcgtttacacggttgcacaaggctacaaaatcacccatatccaaaatctgagaaccgatgtggaaatgtaagcctacaaattttacatgaggcaatgttccggccatatcgatcactttgtccatatcttccatgctgataccgaatttgttctctgctagtccggtggtgatatttgcatgggtatgcgcacctacattcggattgatacggaaagctacacgggctgttttgcctttggcggaagctagttcattaatgatttccagttcgggtacggactctacattgaagcagaaaatatcataatccagacccagattgatttcccagtctgtcttacctacacctgcatagactattttgtttgtcgggaatccggccttaatggctgcgcggatttctccgccacttacacagtcggctcccagaccgctttcgcggataattgtcaggactttgtggttagcattggccttcacggcgtaatgcacgcagaaattattgtatttgcctgcttctttattgatgcatgacaaggtttctcgcagcacattgacatcgtaatagtaaaagggagtttccaactctctgaacttgtttacggggaatgttcctttcatattgtattttgtttttatgagcaagggcgaattaaattcgcccgaaaacaccaactttataaagtgagatgtattcgggcggattgaatccgcccctacagtagaaattatttattgttgaataaatgatcgcttaatgactgcaatgctttcttcttgtcttcttcacgaatcaggaaagaaatattgtagttgctaccgccgaatgaaatcatacgtaccggtatgtcgcgcatggcgtccaacgctttggcttcaaagcctacattttcccattccaggtcaccgactacacagatgatacacatgtcctgatctacggttactgtaccatatttcttcaagtcgtccagaatttcattcagatgtttggtgttatcaatggatacggaaacgccaacctctgaagtgcagatcatgtcgatagaggtctgatagctttcgaagatttcgaatactttgcgcaagaagccgtgggccagtaacatacggcttgatttgatcttgatggcagtgatattgtctttggctgcaactgccttgattttgcctttttccgtatcattggaaatcaaagttcccggggctgtaggttccattgtattaagcagacggacgggaatattggcatatttggcaggctgtacgcaagtagggtgcagaatcttcgcaccaaagtaggccaattcggcagcttcttcgaagtgcaggtgacgtacgggagaagtcttgtctacgatgcgcggatcattatcgtgcataccgtcaatatctgtccatatctggatttcagaggcatttacagcggcaccgatcagtgatgcggtatagtcgcttccgccacgttgcagattatctatctcgccgtaggcgttacggcagataaaaccttgtgtgatataaatttcagcgtccggatgtatttctagctgtgcggccagtttttctttgatatatacagggtcgggctccgagttcttgtccgtgcgcatgaattccaatgccggaagtaagatggcgttgaccccttgttcctgcaaatagttggtaaccatgttggtagagatcaactcgccttgtgccaggattactttttcttcgaacagtgtgaaaatatcttttgtatacgaacgaatataatcgaactgtgcttttataaattcctgtgttttctgcttatactcgtcagtagaataaagttcattaacatgctgtttatatttagcctccagtctgttaatgatttcattcgcaccttcgggatttttcttatacagataatccgaaatttcaaccaacgtgtttgttgttccagacatggctgaaagtacaacaatcttctgttcaccgtcggtaattaatttggctacttctttcattctttgtgcagaacctaccgaagtacctccaaactttaaaactttcatttttcgtttcgtattttaattgttcctatattgataattagcgtgcaaatatacaaataagactgcaaaaatcagcattttagcgatgatatttatcattcatctacttattctgccgtttcttggggtgcaactgtcgttttttctcctttttcggtctcattttgacttctttccatccggctgtattcgtgagtcacttctttgatatgatgattctcaaaacggtagacaactcccggatattccgacaagagatgcagattatgggtggtcatcatgatggcggagcctgtagcacaaatggatttcagaagttctacaattttgcgccctgtttccgtgtccaggttacccgtcggctcatcggccagaataatgtccggccggtttaggatggcacgggcgataacaatgcgttgttgttcgccacccgatagttcgttgggcattttgtatcctttaccggtcattcccacttggtccagtacttcttcaatgcgtgctttgatggttgctttgtttgtccatccggtggcgcgcaatacaaaactgaggttagcgtgtacggtgcggtctgtcagtaactgaaaatcttgaaagacaatgcctaaacggcggcgcagttcgggaatatgcttccgcttgatgttagtcatgttgtagcctagcacctcggcttctcctgactgtatatccagctcaccgtaaattgttttcagtaatgaggtctttccggaaccgactttcccaatgaggtaaacaaattcacccttgttcagttccaggtttacatcttccaatacgcctaattcttgttggttgatatatacgtttttatatcgaatgagagcttcgtccatcattttagtgttttttccacgtagcgctatgacgttctttcaattcacgggcaaggtcctcgatgcgatagccttttgaggtgagcagtacaatcatgtggtatatcagatcggctccttcgtagataaggcgttcgtcggttccgttacaagcttcgataaccgtttccacggcttcttcacctactttctgtgccattttgttgataccggattcgaacaggctggtggtgtaagagcctgcgggcatttcctcatgacgtttgtcaatgaaatcttgtaattcctttaggaacatgatgtcttctttgttttcttctccccagcaagtatctgttccggtgtgacatacaggacctgccggatttactttgatcagcagggtatccttgtcacagtcttcttttatagaaacaacattcaggaaattcccgctttcttcaccttttgtccacaggcggttcttggtacggctgaagaaagttactttaccagtttccattgtttttcggtatgcttcttcattcataaaccctaacatcagtactttgttggtgctgttgtcttgtatgatggtggggatcaacccgttcattttttcaaaattcaaatccatttttctatatttttattgttatattatcggtgttgtatagaacttgtttaaaatttcatcagcatcgtcattcagagtggaatgaggacctgaaggtcgtttgccagtctttcaccctgtctgggatggtaatggaaacagatttagatgcaattaaaaacagagttataacctcacattaattccttgctcgcaaagatactgttttaattcgggaattttaatctctccgaaatgaaaaacgctggctgctaatgctgcatctgctttcccttttgcaaatgtatcgcggaaatgttccatgcatccggcgcctccagatgcgatgacgggaattgtcagtaaatcggccagggtggagagggcttcgttggcatatccgtttttcactccgtcatggttcatgctcgtgaagagaatttctcctgccccgcggttgttcacttctttagcccagtcaaacaggtacttgtcggtttcaatccggccaccgttcagatagcatttccagccagtttcggtctgcttggcgtcaatggctaccacacaaacttgtgaaccgaaatgtttggcaatcttgtctaccaaatccggattacggatggctgatgaattgatagaaactttgtcagctcccgcgttcaatagccggtctacatcgttcagttcgtttatacctcctcctacagtaaaggggatattgatattagccgccacccgttttaccaaatcggtaaaggttttgcgtccttcatggctggcagtgatgtcaagaaagaccagctcgtcagctccctgttcactgtaggtatgccccagttctaccggatcacctgcttgacgtaagtttacgaaattggttccttttacggtctgcccgtctttgatgtccaggcaaggtatgattctttttgctaacataatttgttcttacatgaaacggtttaagtctttcaatgtaatttttccctcgtataacgccttgccgaaaacaacagccgggactttggctatttccaggtcgataatatcctgtatacagcttactcctccgctggctatcagatgcatatccgggaactccttcaggatttgctggtatagttccacggaaggcccttgcaacattccgtcacggctgatgtcggtacacaacaccttgaaaactccttctttagtataatctttcaaaaaagggatcaactgctgctgactttcctctttccagccattgacagaaattttattcttctttacatcagctcctagaatgattttctcgtttccgtattgttccagccattttttgaaaagtccgggatttttcacggctacgctgcccagagttaccatttgtgcgccattatcgaaagcgatgactagatcctcgtctgtctttatccctcctccaaaatcaatgaccagagaagtacggctggcgatttggtccagtacacggtaattcacaacatggcgtgaggctgctccatccaaatcgacaatgtgcagacgatgaatcccatgagcttcaaattctttggcaacctcaaccgggttttcgttatatactttctgtgtgctataatctccttgagaaagacggacgcatttgccatcaataatgtcgatggcaggaattaactctatcatatctatttcttcttatacattattatatataatgtaatggttcacaattctaaaaagttcctcaggattcgttcgcccacggctccactcttttcgggatgaaactgtgttgcataaaaattatctttgtgcaaggccgaactgtaggggaggatataatctgtttgtgctgccgtaaactcgttcaggggcacatagaagctatgtacgaagtacacaaattcttctttggtgaatcctttgaacaggtcgctgcgtacatgggtcagggtgttccatcccatatggggtactttgtcttcatgccgggtggggctgaacaactttacatcagtatcaaagatgcccaagcaatcggcatttccttcttcggagtgccggcacatcagctgcattcccaggcagatacctagtacaggttgttttaagtttttgataacttcatccagccggtttttccggagatggctcatggttgtttcggcttcgcccacaccggggaagataactttgtcggcactcatcaatagttctttatcggaagtgatggttgcttctactccaaggcgcttcaatgcatagtctacggagtagatgtttcctgcattatattttacgacagcaattttcatcagctaaagataactgttttatttttataagccaatacttttcgttcaatatgtttctgaacagcacgagaaaggactattttttccaagtctttacctttacttactaaatcctgcacagtgtccttgtgtgtgatgcgtactacatcttgctcaatgataggaccggcatctagttcggaggtaacataatggctggtcgcaccaatgatttttactcctcgttcaaacgctgcatgataaggttttgcaccaacgaacgcagggaggaaagagtggtgtatgttgatgatacggttggggtatgcttcaatcatttgttcggaaatcacttgcatatagcgtgccagtacaatgaaattgatgttatgttgttccaacagctccatttctgctttttcctgttccattttgttctctttggtaatagggaagagatagaatggtataccgaagcgttctgctacatgctgcagatcgggatggttacttataatcagcggaatttccacattccattctccggcagtgtagcgtgccagcatatcgaacaggcaatgggacagtttggaaacaaatatggccattttgggttttacatccgagaaataaagacggaatttcatttcatatttttgggcatacaatgtttcaaaataatcttctattttatctttaggaataaagaaatcctttatttcccattctatacgcatgaaaaatatattttctacatggtccacatattggtctaagtagacaatattacctctgttaattgtaataaagtttgtgacttctgccaaaatgcctggttggtctgggcagtgcaacaataattttgcagttgtattcatctttttccctaattttcgattttaatctattgagtgcacaaaaatagcgaattattgctaatgagctaaattttataacaagaagtttgttgaaaagattaaaataataacaatatcgtaatttttaggatgggaaggtaaagggagtcggagaatatttttttaatggtttttgccaaaatgcttgcagatttaaaaataatgcgtacctttgcacccgcaatcgagagagaaagtatcggaagaaagattatttgaattattggtgcgttagttcagttggttagaatacatgcctgtcacgcatggggtcacgggttcgagtcccgtacgcaccgcaaaagtcttttttcgatttattaaaattattggtgcgttagttcagttggttagaatacatgcctgtcacgcatggggtcacgggttcgagtcccgtacgcaccgcaaaagtcttttttcgatttatcaaaattattggtgcgttagttcagttggttagaatacatgcctgtcacgcatggggtcacgggttcgagtcccgtacgcaccgctttcttatgaagcaaaataaaagaaaagtcctaaagtattatactttaggacttttctttttgcccaacaccacatctaaaagcagcggaataacgcagttggcactggcttatccgttggatttttcggggaagaaaaaagtccaacgatttagttttgttttcgctgattctcaatattttgcatagtctgatttggaacaatacgatttaactttgtaccactaaaaatacaagaagtatgggagttgaaaaaagacgtagtacactgagtgtgttgttttacatcaagcgacagacgctgctgaaaaacggggaggctcccgtctgtatgcgtatcaccgttgacaagcggaaagcggagattgtgaattacatacggtcctattgcagaatcgaggattcgggtataaatatccgtaaatcgtatacaagccggcttattcaatcgtggtaaatttgcaatcagaaaatgaacaatgaaaaaatagaagattatggatcgcagaaatttcttaaggacggcatcgagttttgcactactcgcagccggagctacgactggtgtttcccgtgtgtttgccaaaactccttcgttctctttgacgggaaatcagtctgatgaaaatacaccgaatatgggcgacacaatggagtatcgtaaactcggaggattggatgtatcggccatcggtctgggctgcctgccgatggtgggttattacggcgggaagtacgacaaaaaggatatgatcgctctgattcgccgggcatacgacaaaggcgtcactttcttcgatacggcggaggtctatggcccttacaccagcgaagagtgggtcggcgaggcactcgcaccgtttcgcgacaaagtgaaaatcgggacgaaattcggcttcggcgtcgaggagaagcaaccgaccgccatcaacagtcgtcccgaccatatccgccgggcagtggaaggttcgctgaaacgcctgcgcaccgaccatattgacctgctgtatcagcaccgtgtcgatccgaaagtgccgatggaggatgtggccgggacagttaaggatttgatgcaggaggggaaagtgctgcattggggactatcggaagcgagtgcgcgttccatccgccgggcgcacatcgtctgcccgctttcggctgtacagagcgagtatgccatctggtggcgggagccggaaaccaaaatcttcccgatgttggaagagttcggtatcggcttcgtgtcttattgtccgctgggacgtgcgttcctcacgggtgtaatcgacgagaacagccgtttctacgagggcgaccgccgctggaacttgccgcagttcacgcccgaagccctgaagcacaatatgccgctcgtggctttggtgcgaaaatgggcggaacggaaaagggttactccggcgcagttcgccctcgtgtggatgttgtcgcgcaaatcgtggatcgctcctatacccggaacaaccaccccggcacatttggatgatttgctcggtgcgggaactgtacgtctctcggcttgggaaatggaggagttcgaccgcgagtatacgaaaatagacctgatggggcatcgtgccgacccgttcaccgaaagtcaaatagataaataaggaaatcaattatggtaaaaacgattttgggtgttctgtcgctgcttgtcatgtcgtcgtgcagtacggtcgtgaaggagaacaccgctcaacccgatattatggaaacgaacaagaaaaatctcggaaacctgttggcactctatcccaagccgatgacggtagtcggggcagaggtcgaagggaaagtaaactggctcgtggtgggacacacgggcgttatcgaccatgaccggatactggtcagcatgagcaaaagccactacaccaaccaaggtatcaagcaatcgaaacggctttccgtcaatctcgtgagccgtgagatgttgccgaaggccgattatgtaggaagcgtaagcggtgcgatggtcgataagtcggaagtcttcgcctaccacactggcgaatacggtacgcccgtcatcgacgcatcgccgctcacgatggagtgcgaggtggtggatatttatgaaaccgagggtttcgacaacttcatttgcgcgatagtcaatacatacgccgcttccgacgtgctcgacagcgacagcaaactcgactatacgaaactgaaacccgtcttgttcgagttccctacctactcctatcttgcgacaggagagatcattggcaaatgtctgaatctggataagcagccgggtatgtgcgctaaagagccgatgagcgctgatggcatcgtgcggttgtcgaaaatagaggtttacccgcagtatcttgacgagtatatgaaatacgcaactgaagtgggcgaaatctccctgcgcaccgaaccgggtgtgctgacgatgtatgcggtcggcgaaaaggagaacccctgcaaggtaacgattctcgaaacctatgcaagccgcgaggcttacgagaagcatatcgcttcggaacattttcagaagtacaagcaagggacactgcatatggtcaagtcgttggtattgtccgaccagaagccgctcaatccggccaacaaactcaataacttcatgcaatagataatgtttcttattcaggttattggaatggattcggagtgtatctacaatcatgattgaatattttgaaaaactgattataaggatattaggatatggatttcaaagaattgaataacagagtaaagatgccggtacaaggctttggtgtctttcagatacccgatgccaccgagtgcgaaaaagttgttaccgatgcgcttgccgtaggctaccgactcatcgacaccgcttcggtctatggcaacgaacgggcggtcggtacggctattcggaaaagcggcattccgcgtgaagaactgttcatcacgaccaaagcatggatttcggaaatgggttacgaacagacattgcaggcattcgaggcttcgctcacccgtttggggctggattacctcgatctctatctcatccacatgcctttcggtgattattacggcgcatggcgggctatggaagaactctatgctcaaggacgtgtacgggctatcggagtgtgcaatttcgaaccggacagattgttggatttatgccataataccagagttattccggcggtaaatcaaatagaggcgcatccttatactccgcaaaccgaagcgatacgaattatgcaggaactcggtgtacaagcggaggcatggggacctttggccgaaggacggaacggattgttcacggacgatattctgaccggcatcggtcgcaaatacaataaatcggcagcacaggtcgtactacgctggcacttgcagcacggaattgtcgccattcccaaatcggtacatcgccagcggatggaagagaatttcaacatcgaggatttcatgctgacaccggaggatatgaccgcaatcgcttccatgaatacgggatacaatacgattctcgacctacacgctccggaagaggtgcaacggctctatgatatcgagtgcccggcatgacagatatacttaaaatctcttttatactcccgtaattcaaacgattatgggagttttcatttgtcggggataattctacctgctaaaaaagcataatcagtaatttgggtataaataccgaggatttatctaccaagcgtgtggcggagaccgtctatttttgcatcggataaaaaataaataaaaacaaaagactatgccacacattgcagtaacgatgttacccggcagagatcgggaaacaaaacaaaaattagccgaaaatttgtgcaacacattgattgaaaccctcggagtcgatgccaaattcgtatctgtatccgtcgaagatgtggagatgaaagagtgggaaaattcaatgcaacgcattccggcagaaacaatcattgtaaatcccaataaaaaatgaatatgaaaaagttattattgattcctttgttactgctgaccgtcctgtcgatggcggcctgtggcggaggtgatgacgaaccgtttagacccggacaaccggaaactcccgaacaaccgggagaaaaagaggatggagaaccagaaactcccgatgtatcttctttgaacgtaaatattactgtcggcgaccgtaccgttaccgctacgatggaagacaatgccgccgcacgggatttcctctctcgcctgcctcttgaaataacactgaacgattataacaacatgacggagaagattttctatcctgatccggctctgacaaccgaaggcgtcacacgaggctgtgcccccacacccggagatataacaatctatgcaccgtggggcaatgtagctattttctgtaagagttggtctcatagtaacgccctgattaaaatcggtcgtatcgacgggaacggtatcgaagtattaagtatagccggagatatacccgtgaagattgaaaggagataagacgcatgacaacagatgcattcaaagaatatgtcaagacttgtagggcactcgatacagaggagatacaccgctttatggacgatatgagcaacgaagcccggcgcattactttccggctgaatacagcataccacacacaggacgaagtacgcggattactttccgagctattcggttacgaggtaccggaatcgctccgggtatttccaccgttctataccgatttcggtaaaaatatcaccgtcggcgaaggggtgttcatcaatgcctgctgtcattttcaggatcatggcggagtgataattggtgacggatgccagataggacataacgtggtctttgccacactcaatcacggtttggctccggaagaacgtcatacgacctatcctgcacccatcgtgttgggtaagaacgtatggataggttccaatgcaacgattctgcaaggcgtaaccatcggcgacaatgtcgtcatcggggccggagcggttgtaacaagagatttggaagcaaatacggtagcagctggtgttcccgcccaattcattaaatctatagtactataacatgaaccatcctctgttagataaactttataacaaagcaaattgagccttgaagcaaagtggtcataaagggcgcttcgtacttttgcgctgttataagtcgaatatgaataataattaaaaataaggaaagtatgaaagtaatatcaaatgcagaattcggaggtgaaagacctttgttcgaatcacatgacttacgtttggaaaatgtaatcatccgtgccggagagtcggccatcaaggagtgcagcaacatcgaagccgttgattgccggttcgaggggaattatcctttctggcatgtgcatggtttcgttatcgaccgttgttccttcgatgtcggaggacgttcggcgctatggtactccgaccatctgaaaatgacgaatacacgcattgatgcgcccaagatgttccgcgagatgcacgatatcgaaatcgagaacgtggagataaacgatgccgatgaagtgttttggcgttgccggaatctgaatatcaaaaatctgaaactgcatggcggcacttatcccttcatgttcagcagcaatatccgcatcgacggattggaaagtgacagtaaatacgttttccagtacgtgaaagatgtggagattcataatgccaaaatcaccacgaaagatgctttctgggaggtggagaacgtgacgatctacgattcggaactcaacggcgaatacttgggctggcattcgcacaatctccggttggtgaactgtcacattaccggcgaacagccgctctgctatgcccacgacctcgtgttggagacttgcacgttcggccccgactgtgaccgggctttcgagtacagttcggtgcaggccaccatcaaaggtgcgataggcggagtaaagaatccgcgaacaggttgtatcaccgccgagagctacggagagattatccttgacgagaatatcaaggctcccgccgattgcaagctgagactctgggatgagaaaacttgttttaccgattgacgtacttgcgaataatttaatgggaataggaaagggaaagactgattatctgttatcgcttatccgcgaagggaaacaaatgacgctggggcagcagttacgcctgactgcatacctcagcgtcccggccattatggctcagatatcttctatcgccatgcagtacatcgatgcctcgatggtgggcagcctcggtgcgaatgccgctgcttccatcggattggtctcgaccacaacttggctgttctggggggtgtgtgcagccgctgcgatgggattttccgtgcaggtggcacatcgtatcggagccggggatttcgtggaagccaaaaagatactccgtcaagcagttattgccacgcttgttttcagttcgctgttggctgttggcggtatttgtatcagcggtatgcttcctctctggttgggtggagacgaggcgatatggaacgattcgtccctctacttcagaatattcgcactattcctgcctgccttgcagttgaactttcttgcaggaggcatgttgcgttgcagtgggaatatgcgcgtgcccgccatgctgaatataatgatgtgcttgctggatgtcgtgttcaacttcttcctgatctttccgacgaggcatgtggagtggttcggagtagtatttaccgctcccggtgcaggtctgggtgtgaaaggtgctatattgggaacggtattggccgaactcgttaccgccggaggaatgatgtggtatctatgccgccgctcgcccatgctgaagttcgtcggagaacggggaagttttctacccaaacgggagacattgcgtaagtctttccgtatttcgttaccgatgggattcgaacacatggccatttgtggagcgcagatcgcaacgacggtggttgtcgcaccgctcggcatcgttgccattgctgccaactcgttcgccattattgccgaaagcctttgctatatgcccggctacggcatctcggaggctgccacgacgttggtcggtcagagccttggagcgaaccgtatccggttgctccgtcgttttgccaatattaccgtctggtcgggaatgctgattatgggtgttatgggagcgttgatatatgtggcggctccgcaaatcatcggagtgatgactcccgtggaggaaatccgcacgttgggaatcgagattctgcggatagaagcctttgcagagccgatgtttgcggcatctatcgttgcctacggtgtattcgtaggtgtgggtaatacattcgtacccagtctgatgaacttcggcagcatttggggcgtgcgactgacactggcggcatggcttgctcccacgatgggactacgcggcgtgtggcttgccatgtgcatcgagctttgtttccggggagtaatcttcctcgcgagactttggggcagtaactggatttataaattacgaataaatagataagttatgaaatacgatttcgatacgattatcccgcgtcgcgggacgaactcttacaaatgggacactcctgaggaggaaaatgtgctgcccatgtgggtggcggatatggatttccgtactgcaccgaccattgtagaagccttgcaaaggcgggttgcacacggcattttcggttataccaaagtacccgaaacctattacgatgcagtcgtccggtggttcgagaaccgtcatcgttggcggatagatccccggtggattatctatacaagcggtgtcgtaccggctctgtcggccattatcaaagccctgaccgtaccgggcgacaaggtaatcgtccagactccggcatacaactgcttctattcgtcgattcgcaacgacggatgcgaactgtcggccaataacctcatttaccgagatggtcgctactcaatcgacttcgacgacctcgaagcaaaggtggctgatccgaaggcgaaaatcctattactatgtaatcctcacaatccggtcggacgggtctggacgccggaagagctgcggcatatcggagacatctgtttgcgcaacggagtgtttgttgtggcagatgaaattcattgcgaactgacctatgaggggtatgactatactccttttgcttccctgtctaaacgcttccaacaaaattccgtgacttgcgtttcaccgagtaaggcattcaatcttgccggactgcaaattgccaatatcattgcggccgatgatgatgtacgtcgtcgtattgaccgcgccatcaacatcaatgaagtgtgcgatgtcaacccgttcggcgtaatcgctacaatcgcctcttataacgagggtggagagtggctcgatgctttgcgcaaatacttgcgtaggaattacgaatatctctgccacttttttgagcagcggttaccgcaatatcccgtgttaccactcgaaggaacttacttagtatggatagactgccgagcactcggtatcggttcggatgctatgaccttgcgcctgcaagaggaacaaaaattgatgatcaattcaggtacgatgtacggacccggcggcgagggatttatccgtctgaatattgcttgcccccgaacactgcttgttgaagggttggagcggatggcccgtgtgctggaacaaaatgaagaataaaccggcaatgagataaaaaatcacgttatcaaagaataaagaaaaagtaaatatgaagaaagaagtaatgatattgaccggtgccggtcagataggaatggcgatagcccgccgtatgggatatgggaaaaagatcgttgtcggagacctgaacccggagagtaccgaggctgtttgccgtatattgaatgaggcgggatttgatgcagtacccgtcgaaatgaatctctcttcaagggagtccattttgaacttgattgcggttgcacggaaacatggtgaaatttcaatgctcgtcaatacggcgggcgtatcaccgagtcaggcttccatcgaaacgattctgaaagtcgatctgtacggaacggctgtcctgctcgaagaagttgggaaggttattaaagaaaacggtgtcggggtaacgatttccagccagtcagggcatcggatgcccgcactgaccatcgaggaggatatgctactggccacgactcctgccgaagaattgctctcgctcgacatgctgcaaccggatagtatcaaggatacgttacacgcttaccagatggccaagcgttgtaacgtgaaacgtgtaatggccgaagctgtgaaatggggcgagcgcggggcaagaatcaactccatttcacctggtatcattgtaactcccttggctatcgacgagttcaacgggccgcgaggtgatttttataaaaacatgttcgccaaatgtccggcaggacgccccggaaccgcggacgaggttgccaatgttgccgaactacttatgagcgacagaggggcatttatcacgggagcggactttctgatcgatggtggtgctacggcatcgtatttttatggcccgttgaaaccgtaatgtgttgtactgtaatctgtaaggtaacaactgccatacgaggtcaagagtacaaaaatattttattcgttttgtaaacttgagccttacaacaaagtttttatggttggaatgcgttatatttgcgaaaattaaaaactgacaatatggaacgattagatgtattcgattgctcgaacgtgcttatagcgagttatttcaccgatgaccgggggtgcgcccatgaaaacagggagcatacgcttatttatttgtgctccggtgagttggagatagaggaacgtggcaagaaaaccgtgttgcatccgggggattgtgctttcatgcggcgcgataaccggatgtggttgcagaaaaaggtagaggacggaaagccttaccgttctgtcgtactgaagttctcaagaccgtttctaagagaattttaccagacgcttaaccggcaacagattccgaacgactccgaacgtgagaaggtaagcctgcgcgtgttgcccagtaacaggcctgatatccgttcgctgttcgaatccgtcattccctatttcgatgcaggcgaaaaaccgtccgaagacgtactgaagctgaaaatggtagaagggatatatgtactgcttaataccgaccggaatctctatgcgtcgctgttcgacttcgtggagccgtggaaaatcgacattctcgactatctgaacgagaactacatgtgtgatctctctctggaggagatcgccagttacacgggacgcagcctggctaccttcaagcgggactttgccaaagtaagtaacctgacaccgcaaaagtggattatcaaacgccgtctggaagccgcgcacggcctgataaaatcaggcaagaagaaagtgacggaagcctgcttcgatgtgggtttcaagaacctgtcgcatttctccaagatatacaaggaggcttatggtgtcgctccttcatggtaagatgaacttcaggacaaaactgtttgagccttgcagcaaagctgttgtggaataatgcccgtacttttgtgtcggaaacaggaaagacctgtcggttgtcttggaaatgtcgaactaaaaatcatatcgtatgaaaacaaaagtagcatcattagctttattattgactttaatttttccgatcatggcaaaatcacaagtgaaaatccaacagactgccggacgcgacgcgctcggcgaatttgcccccgaatttgcacgtttgaacgatgatattcttttcggggaagtgtggagccggaacaacctgctttcgctccgcgaccgttccatcgtaaccgtggtggctctcatgtcgcagggactgaccgactcctcgttcaagtaccatctcgaatcggcgaagaagaacggagtgactcaaaccgagatagccgaaatactcacccatgccgcattctacgcgggctggccgaaagcgtgggcggctttccgtatggcaaaagaggtttggaccgacagtaatgcagacagcgtggcggcaggttcgctcgaagcgtacgcgcaaactatcattttccccgtggggaaacccaacgatgcctatgccaagtatttcatcggtcaaagttacacggctcccgtggtaacggacggagtccccgtggtaaatgtgaccttcgagccgggctgccgcaacaactggcacgtgcacaaggcaacaaaaggcggcggtcagacactcgtatgcgtgggcggtcgcggctactatcaggagtggggcaaagagccggtggaactacgttccggggatgctatcaatattccggcaggcgtgaaacattggcacggggcggcacccgacagctgcttctcgcatttggccatcggagtgcccggtgagaacaacagtaccgaatggctggaacctgtcggtgatgaagaatattctaaattaaaatgacatgaaacagatagtattgatacttatgagcctacttactttcagtaacccgtcgaaagcacaaaaacaaacagcagataccgacagaccgtccgacaagaaaatccttgtagcctatttctcctgtacggggaccacagagaaagtggcaaccgctatcgcaaaagagactggcggtaaacttcaccggattactccggctacggcctacacttcggcagatctcgactggaacgacaaggcgagccgcagttcggtggagatggcagacgacaaatcacgtcctgcgttgggcggagaaacgattgaactgaaagattacgacgtggtgttcctcggttatccgatatggtgggacttgtgtccgcgtccggtcaatacttttcttgagaaatatgatttcgcgggtaaaaccgttattccttttgccacttcgggtggcagttcaatcacgggtagcgtgaaacaactcaagagactctaccccaaaatcgaatgggaagaaggccggttgtgtaatagaagtacgaaacaagttggagattgggccaaacaagcaatcgaataagccaatggaagagttgcgaatcgactgcctgcaccagacggaagaagaactaggcgtggtaaaagagctgcggcaaaatatcttccggctgaatcatacgatgccggatacggaagaatatcgtgaattattacacaaggtttttccgcatttcggagagaattgtcgaatcgaatacgatcgttgtaggaaatccagccaagttaatcaggagaatatagattatggatttttcggaaaaagtcattttaacaaagtgaacttcataacaaaatcttttgagcctcgcagtaaagtcgttgcggggctctctttttacctttgttggcagaatattaaaacaaaagaatcatgaaaacaatgaatgagaaagtaacaatggtaacgggggcagcggcaggtatcgggctggtctcggcagaagcatttgcaaaagcgggtgcaaccgtagtattggtggacatcaatgagccgaaagaacaagccgagaagttggtttcagaagggtataaagccgtggcatatcgctgcgacgtgtccgatacacgggctgtaaaggagatgattgactggatcgttgcgacttacggcaggctggacgctgcattgaacaatgctgggatacagaccccgcaacggccgatggccgagattaccgacgaggagttcgaccgcacggtagccgtcgatctgaaaggtgtatggaactgtatgcgttacgagattatccagatgctgaaacaaggcggtggggccattgtcaatacctcgtctcaaggcggtgttacggggttccccggacaagcggcctatatcgcctgcaagcatgcggtaatcgggcttacacgtacagccgccattgattactcggcaaaagggattcgtatcaatgccgtctgtccgggtgtgatccgaacacctatggccgaagaactgatacggcgtaaccccgatctggaaaaggaactggtccgagatattcctgccggacgtctcggtaaaccggaagagatagccaacgccgtattgtggctttgctcaccgcaggcaagtttcgtggacgggcacgcccttttagtggacggggcattttccattcattaagttataatgtataaaacataaaatcatggaagaaaacaataaaatggatatcagccgtcgtggatttctcaaaacggctgcattggcaggagccgcaatggccatgccttcgggattgggcaaagtattcgcttcagaagcgaaacaagcggaaacatccgatgtggtggatatcgatgcagcccgtatcaagggacatcgtgtattgggtacgggcaaggcggcattcgaggtgtcggcactcggcttcggtgtaatgggcatgacttacaaccgcagccaacacccggataagaaagagtgtatccgattgttgcatgaagcggtagagcgtggagtgacgctcttcgacacggctatcatttacgggccgttgaccaatgagaacctggcaggagaagcgctgtccgagttcaagggacggattaacgtaacgaccaaattcgggcacgaagtcatcgacggcaaaggaactggtcgtcaggacagccgtccggcaaccatccgccgctattgcgaggagtcacttcgccgattgagactcgattcactgccgatgttctaccagcaccgtgccgacccgaatactccggtcgaggaggtagcggctaccattgccgacttgatcaaggaaggtaaagtgcaacgctggggtatgtgcgaggtcagtgccgaaacaatccgtaaggcccacgccatttgtccgctgacggctatccaaagcgagtaccatctgatgcaccgcctggtggaagagaacggtgttctcgatgtatgccgggagttgggtatcggctttgtaccatacagcccaatcaaccgtggatttttgggaggctgcatcaacgaatacacggtcttcgatgtaaacaacgacaaccgtcagaccctgccgcgtttccagccggaagcgatgcgtgcgaatacccacattgtaaatgcgctgcaagctttcgggcgcacacggggcatgacctcggcacaggtggctcttggctggttgcttcagaaagcaccgtggatcgtaccgattccgggaacgacaaaactgtctcatctggaggaaaacctgcgcacactcgacttcaacatcagctccggggattggaaagaactggaggataccgtggctgctattcccgttgtgggagaccggtacaatgccgaacagcaacgtcaagtaggccgataaggaatcagtaaatggtagtataatccgtaatttgtctaccggcagagcgaagaagctgccttacttttgcattataaataaaaaccaagaatatgagaccatatataatcagtcacatgatgacttcggtcgatggccgcatcgactgcccgatggtcgggcaactgagtacggatgagtattacatagccttggaaaaactggggccttgctcgaaactgtcaggacggataactaccgcactcgaatgttccgccgtcaaagaagaaagtaccccgatggagggaactccgataggtcataaatccgtatatgtcgccaataaatcggacgaatatacgatcattgtcgatacctatgggaaactgcgttggcaggagggtgaagctgacgggcatcctctactttgtattgtcagtgaacaggtgtccgagaaatatctggaaacgctgcgcacatcgggtatttcgtggattgccaccggtgcggaacgcattgacttgccgcaagctatggagctgctttgtgaacatttcggcgttgaatgcttggcgattgtcgggggcggacatatctgcggcggtttcttggaggccggactgattgacgaagtaagtattatggtagctccgggtattgacgggcgtaagggacagacggcggttttcgatggaatctcccgtgtggaatgtaacccgtacaagctgaaattagagagtgtggaacaatgggaagcagatattgtctggctccgctataaagtaaaataatacggctatgaagttacaaacaatcgccatattgacgttcctgacctttgcgaatgtcatggcacaagaaacgacaacaacaaaatatataaattcaaccggtatggaaccattggaattgacacaggaatgggataagacctttccgcagagtgataaggtggaacataagaaaatcacgtttcacaaccgttacggcatcacgcttgccgcagacctttacaagccgaaaaatacgcaaggacatctggcagccattgcagtcagtggcccttacggtgcggtgaaagaacaggtgtcgggccgttatgcccagacgcttgccgaacgaggttttctgaccatcgcttttgacccctcctattatggtgaaagcggcggtacgccccgttacctcacctcacccgaaatcagcacggaagatttcagtgcggcagtcgattatttgacatcccgtgcggacgtcaatccggaacgtatcggaatcttaggtatttgcggttggggcgggtttgcacttaatgctgcggccaatgaccctcgtatcaaagcgacggtaacatctactatgtatgatatgagccgggtaaatgccaacgggtatttcgacgccatgagtgccgatgaccgctataagttgcgcgagcaactcaacgcacagcgtaccgaggattatcgtgatgacagctatgcacgcgacggtggcgtactcgaccccgtgacggatgatactccgcaattcgtcaaggagtatcacgactactacaagacggaacgaggctatcatcgccgttccccgaactccaacgagggaatcacgaaaaccagcgtattgtcattcatcaatatgccgctgctcacctatattagcgaaatccgcagtgctgtgttgatgattcatggagaaaaaactcattcccgctatttcagtgaggatgcctacaagcggctgacggggagtaacaaggaactgtcgattattcccggagccaaccatgtcgatttatacgacaagattgatgtgataccgttcgacaagatagacgggttcttcaagaatgcgttgaaataaaatataaaaataatgccgaaaaaacttgccatcctattcgcttatttcctgatttatgtagtttgggggtccacttactactttatcggggtggctttacacggctttccgactttccttctcagtgcattgcgcttctctacggcaggattgatactgcttgtgatatgtgcatgtcgtggagaacgggcctttaccccaaggcttgtaggcaggtcggctgtgagcggaatcatcctgctgttcatcgatatggcggtagtgatgctggcccagcgatatgtcagcagcagcctggtggctgtggtggcctcctttaccgctatctggattatggcactcgatgctccgatgtggaaatatacctttcggagcaaatgtatccttgccggtattttgatgggatttgcaggagtagggttattgtatgccgagcaactggaaatgacggtaaccgtacacgatcatagtgaatatggtattttactacttgtagtcggttgtatttcctgggcattgggaacactttatacaaaataccgttcatcagacacagaacctgcaaacgcgtttgcaggttccgcctggcaaatgctttttgccggcatgatgttctggatatgtacattggggaacggggagttctctcctatggaattcagtacggtccctctatacgcctggttgtcattggcctatctgatattgttcggctcgctgatggcttattccgcttacgtatggctgctgaagatccgcccggcaacggatgtggccacccatgcctacgtgaatcctgtagtggctgtcgttatcggtggcgggctgggcggggaacagattacaggcatacagttgctcgggcttgtaatcatactgggaagcgtcatgttggttaacaaaaaagaaagaatcaatgaataaggaaatggatataaaagacatggtacccgtgaagacctcggaacgccatgtcatcctcgatgctttgagaggatttgcattgctgggaatctgccttgccaactttccggaattttcgctttatacctttcaaaaaccgagaataacagaggccatgcctacggcagaaatagatcaggtagtccgcttccttcaatacctttttgtagacggtaagttctacaccatattctcgctgctgttcggtatcggattctcaatcataatcagcaacgcagctaaaaagggaacggacggattccgtatcttttatcggcggatgattgttctggccaccatcggttttctgcacctgatgtttatctggagcggggacatcttgctgttgtatgccttattgggcatgttgctccctcttttccggcatgtttcggacagagtgttgctgggtacttccgcagtcctattgctacttcctattccgattgattggctggccggtacattcggagtgtccctgtcggctcccgcagtacgaatgcaacagcactattgtaatttatatggtataacggaatataacttcggaatctggctgcgtaatgcggaaagctacggagaggtctttcaatttctgatacagggtgcatgggtacgcttgcaggagttcatcgacggcaaccgctattttaaggtattgggattgttcttattgggctgctacattgggcgcaagcaaatatacgccaatcttgaggcaaatcggatgctactgaaaaagacggtgacatacggttttctgctgggacttcccttgtccgttctctatgcctggagtgcggtaaacgggcatcctttcggaacggctgcacacaccgccatctacacggcaagtgtctatcctttaggttttgcatatgtttccgctatctgtctcctgtacctgcatggtagagggtggcgcttgtggcgctgtcttgccgctccggggagaatggcactgaccaattacgtgggacagtcggtatggggtatggttctcttctacggtatcggcttcgggctgggggtcggcattggattgacaggaacagaatccatagctttctacgtctttcttgtccagatggcattcagtgtcctatggctctcctatttccgcttcgggcctctggaatggggctggcggatgctgacttatgggaaatggctaaaaataaggaaataaagtaattcaataataatcttactctaaaacataacaatatggataatagaaaattaggacagctggaagtatctccgataggaatgggatgtatgggattcagccacggttacggacaagtgccgcccaaagcgtatgccatagaagccatccgcaaggcatacgactatggctgcacgcatttcgatacggcggaagcctatggcaaggaacaattctacgccgggcataacgaggaactggtaggtaaggctatcgagccgttccgtaaggaggtggtactcgccaccaaatttcatattggcgaactctcgcaaccggacgagacgagtctctaccgggaggtgcgccggcatcttgaagattccatgagcagacttcgtacggattatatcgacctgtattacctgcatcgcatcaatgagacggtccggcttgaggatgtggcaattgtcatgggacggcttgttaaggaaggactgatacgtggttggggattgtcgcaagtatcggccgaccagatacgagctgcgcatgagattacccctttgtctgccgtccagaacatctattcgatggtggaacgcgattgcgaaacggagattttcccggtgtgccttgaaaaaggaatcggagtcgtaccgttctcgccgattgcaagcgggttcctttcgggtaaggtaacggcacaggagcagttcggcttcgatgacgtgcggaaattcgttccccaactgtcgaaagagaatatcgaggccaaccggcctatactcgatttgctgcatcggttcgccgtggagaaaaatgcgaccaacgcccagatatcgcttgcgtggatgctccataaatatcccaatgtcgtacctattcccggttccaagaaccaggaaaggattctggagaatctgggggcttggaacgtcacgctttccggtgatgagttccggcagttacaatcagcattggatgaatgtaaggtacacggacatcgtgggtgcgtggaaacggaacagacgagttttggtaaacaatggagtgaagaaacagctaagtgaattaagccacattcagtccggtactgaataatcaagaaaaaaggtagtgaacttcctgacaaaacaaattgagcctcgcagcaaagacgttgcggggctttgcttttacctttacatcaaatgaataacttaaaaataacagatatgaaaacgaaacttttatttctctttgcatggcttatgttagccattacgggctgttccgcgggcgaacctcaaacggaagaatcgacaacacctccggttgaaaaaacggaagagccagtcgaaccttccggggacaaaaaagtgctgattgtctatttctcccatacgggtaatacccggacgattgccggatacatccatgacacggtaaagagcgaccttgtggaaattcaaacggccgatacttataccgatgattatgatactttgctggcacaaatccgggaagaagtggcatccggatattgcccgcctttgacaacgaatatcgaaaacctctcttcgtatgacgtgatattcatcggttatcctatctgggtggaaactgccgcacctcccatccgcacgttcctcacaacacatgacctcgcgggaagaactgtcgttccgttctgcacgagcgggaccagctctgccgaggcaagctaccggcttgtccgttccctttgtccgcaatcgactgtattggagggcatacagattcgtcggggaacgtatgacacggcttatgaacgggttatcgcgtggttgcaggaaataggtattgtcgaactgaataacggaggaaatgatgaaaaataaacaagatctgtcacgccgtgactttatccgtaactccgtgatggcgggaggagccgtgctgctttccggtgtattgccatcacatgcgcagacaccgatattctctgccgctgaaaattcggattcgcccgaagccgatgaactgctgcgtggtgtcagtgacatccatctgcacgcagctccggattccaaagcccgtttgggaaatgaattggagtttacccgcgcggcacgtgatgccggctacaaatccatgctgttcaagtccaacgatttcagttgtcatgaccgggcttatctgatccgtcaggagttacaggggttcgaggtattcggaagcctgtgtatgaaccgggtacacggggataaggtaaatgtattcgctgcggaaaaagccgtggccacaaccggcaatctttgtcgttgtatctggatgccgacgcaggatgccgtttaccagaatatccgctatcacggcaggaaagagggtgtgcccgttgtggacgataacgggcgtgtgctgtctgaagtcgtgcgagtcatggagatatgtgccgaagcgaatatcattttcgcaacggggcactcttcgtccgaggagagcatcacgctggctcggaaagcccgtgaggtgggtgtgagaaagtgtgtcgtgactcatgccaattccggtatctggaaaatgacgcacgatcagattaaacggtgtattgatctcggcgcgtggatggaatacagctacattaccaatttgtggggaccgggtacgggactgcccgatttcgagcggatgagtgataaagaatttgcagactttgcacgtattgccccgcagcggagtatcataacgaccgacctcggtcaggttgggatgcctcacccagtggatgggatgcgccgctgtattcttgcgttgctggaaaacgggcttgcacagaagtaggtcgattttatggtacgtagcaatcccgcacaacttgtcggactttctgtatctgaataaactttatatggaaacagaacagcatatttattttttcgagtcaatagatacggtatctcaagcctgtcatcttttttccaatcatacgctggtatatctatacagcgggcggttgtatttgcggaaccagtgcggcgaaacgctgaatatcgaaaggggcgacagtgccttcatcggacgtgacagctattcgcacatctatgctgagccggaattgcacgagccttgtcgggttctgttcttctctcttccgcgagagttcttgtgcgagttttatcatacactctctccatccgaccgcaaatcatcgactacggaactctcggccctgcaccgtctgtcatccatatccgaaacggagagccttttccggtcatggatgccttacatgcgggaggggcaggaaattcctgaaacggtgctgcgattgaaaatgacagaagcggtctatgtcctgctgaatacggataagcggtacattcccacactgttcgatttcgccggaaaatgccggatggacatgttcgatttgctgaacaaaccgatgacgaaagagattagatggcaggaattacaatttgagcctgacagcaaattaaattgacctttataacaaagcccaagatttgcagttgccgtaattttgcaatgtagatcaattaaatagaataaacgatatgtataagaaaagtattttgtcacttatggttatgctactgttcgtggcgacatcgtgcaacagtgaagaaccggcggcgatagagccgggaggaaccatttcaggggatgcgggaaagaccctgatcgtctatttttcatggggaggcaatacccggacagtcgccaatcatatccacgaccttataggtggcgacatcgtggaagtggaaatggtcgttccctatccagatacttatgaagaggtgacgtagatcgcaccggaagagctggagagcgattaccgtcccgagttgaaaacaaaggtggagaatatggacgagtacgacacgctgattgtcgggacgcctatctggggaggacaccttacaccggcgatgaaaagtttcctggccggttatgacctgtcgggcaaatacatcgccccgttctgcacgcatggcggtagcggcacggctcaaagcgtcagcgacatccgttcggtatgccccaattcgacaatactcggaagtctggccgtatatggcagccaggcggaaaattcacgcggcgatgtggagaaatggctcgaacaaataggtattcttaaaaacaactgacattgaatcatttaattaaattataagcgttatgaaaaagtatctgtattttttgtttgccgcttttgtagcggtgggattgagcgcctgctctcccgatgaagacgaaccgtacgcacctgataccgaggtgccgacaccgactcccgatcctgacccgacatcgggaaaaacgctcattgtgtattacagctttacaaataatgtgcataccatcgtcagcgatttgcagacgcagatagaagccgatgtggtacgggtcgaacctgccgaagaggggctcgactatgcggccaataactacgcaataggtagtgcgctgattcaggcaatccggaataatccgaatgatgcggcatcctatccggaaatcaaacccgtggaggtgaatatcgccgattacgaccggattatcgtaggcgcacctctttggtggagtaatatggcagctcccttacaaacattcctgttccaatatggtagtctgatggagggtaagagcatcggactgatcgtatccagttccagcagcggtatcagtggtgtcgagtccgatgcccgacggctcattccgggtggcgacttcctcgaaccgagcctgtggatacgttcaggccaaacgtccaactgccactcaatgattgccgactggctgagtcaaatcaattaaaaaagcaagattatgaaacggttatttatatctttattgctgctcgttccggtaatgacttttgccggatgtggagcaggggatgacagttcagaaattgatatccccgaagttcccaatgatccgggaaacgacgatgatgataacgacaatccgggaacggttacccccggaaacggaaagattctgattgcctggttcagccgttgggggaatacgaactatgcggcggatgtggatgccacgaccggggcaagcatccttgtagataagggaacgcgtcgtggtacgaccgaaatggtcgcccgctatatccaaacggctgtgggcggagacctgcatctgatagagacttcggaaccctatccgacggagttcgacgatgtgcgcgaccagaaccatgcggagcaggctgccggaacacttcccgcacttaaaaaacgcattgagaatatggaccaatacgatattgtctttatcggctacccgaactgggcattggatgttccacaagcaatacgttcgttcctgtcctcttatgacctctccggcaaaacagtcgttccgttctgtacgcatgacggatacggagccggccgcacctataattccgtcaaagaggaagctactggtgcgaatgtgctggaaggcattgctattgaggcaacagacgtaccttccgccgaatcgcaagtacaggactggcttgaacgaatcggtatcgaacgggaagagtcgcagggtgcgtcggttcgtattactgccggagggcatacgtttaccggggaatggctcgacaccccgttagctgacgaaatccggggtatgtttcctctgactgcgactttgggacgctatggaggccgtgaatattacggttctatgccccggcggccgactaataccgaagaggggcagcttcgtttcgaaaacggtgacatcacttattgtccttccaataacacgattgccatcttttatgccaaagcagatgaccctgacatggggcaactgaccatgcggattattccgatagggaaagttacttcggatttgatggttttcgatgagatggacagccgtctggaatttacattcgacaatatacaataacaggagaagatgatccggaatgagctaattatgtctgccttccgggtcatttttattaaaagtaaaataaacaaataaaagctatgatggtaacaccactatttatcggcggtatcggcatgcaggaagtactgctgatcgtattggttgtattgctgttctttggcggcaagaagattcctgaactgatgaaaggaatcggcaaaggcgttcgctctttcaaggaagggatgaacaatgtagaaaaagagatagacgaaataaaggacatagaacaaaaaggataactgatggctactgaagcgaacacacaatctttttgggaacatctggacgtgttgcgggcggcaattataaaaattgtcgccgtagccgtcgtgttcggtatcgtggttttcttcttcaaagaacagttatttggcgttgtactcgtaccgaaggatgacggttttattacctatcagctgctcaaccggatggctgcatgggcaggaggtgcaatggaatcattttccgttcgacttattaatacagggttagcgcggcaattcatcatccacatgaagacggccctatgtgttggcgtgctgtgtgcttcgccatatattctttatcagttattccgttttgtctctcccacattatacgataacgaacggcgatatatcacgcagacagtcggagtcagctctgtgatgtttggatttggggggcagctactttctgatctttccacagacttttcgctttttgtaaacatatcaggtaagtggtgaggtggataatttgattgtgtgcgattcgtatatcttaacacttttaatgatgtgccttgcgatgaacattgtctttgagatcccgatactctcatgattgtttgcgaagttagtttttctttcggtagattttatgcgccgttattggaaacaggcagtcgtgattatctttatggttgttgctattattacgccgacaatggataattttattaataatctcgaaaaagagattgaaaagaaattgaagacaatcgaatctgcggatttgaatatcatgaagaaatctcttgaaacctcacaaatattagttaatgcttttcaaaaggtaaaagaatttattggttcctatacattcaaggatgaagcggaagaaatagatttctttaaagaaataaaacctcgtttgttctaccgattgctttcttattgtaagatttataatatagaaatgaatcgtccggtaggagtagattcacagcgggcttatctgattgatgaaatcaaggctatcaaccgttataacgcaaaacgttcggattttgtacattattaccgttcaggcttgacacaccttgattcaatttattatttacgaggacgtattgacacggctctttatttggaattgttctattacgaacgtgaaccgatgttttctactaattgcgatttcaagtttgctaggctgaaagctaacgagatgttgatggtatatctgaataaggaactcgaagcattggaaaatcgccagttagagcagtctttacctcgtgtccgtatcacatgggttgcgacaaaaacagaactttacgagcaaatctacgcatgggatagccgtaaagtctttggtgatattcctttggcaaaactttttgactatatccagaccgtttttaatattgaattggactctaaccattcacgcacattcagcgatatgcgtatccgtaacaataagacatctttcttggattcattgaaagaagcattaaccaaacggatgcaaagctggacacaagggcataaaaagaaataataacctaagactttagatcgagtaggtctgggtatttcagtccaaacctctcatataaccatatgtgaaaatttctctttatacaactactctcatccaaacggttttaatcggttgggcttaacacccaccatgttgtgaatagtcatatactgattgagacgatagcaatcctctcgaatcttgccatattttcttatctctttttcctcaaataacaatttcctcatttttattacctcgtcatgacttccccttgcatggttcagggtgcgaagctacagtcggggcctctaaaaatctgcctcctgaaacgagcaaggtgaagccaccgacaaagcataaaaaagtcaatgttatgaaaaagagaacagaaatacagcaagatttgaaacgaggcttcggctccattccaatcggcataaaaattttggtgaagtggttactggtcggtttcgttgcgtatgtggcggtgcgtttcgtgtgtgccttcgttggtggtatggtgacgagtttaggcggtattctgcccacgttggcggttttggcggtagtggttttcctcatccgtttaagtatggcgcatcttttccactgtccttaccctttttcattcttctctttttcatcatccttttttgcgtgatactctgaaccgaaatattaatcattaaaacaattcattatgaacaaagtacatttattgggagcgaacagaagttatgacagagacgaacagaccgtttcagtcaatcaagtggtaatgctggaaggttacagctacgacagctatgtagtgtatgaagtaagccgcatccagtagggaataacctatcatcttatcaatttgcggacgtacgaatttcatacttccgatcttatccgacctttgtcggaaaaattcgggataggcatgtattatgacgatgcgaaccccaagtttttagatctgttggaaacggctgccctgcttaccaaagcgaggaagaagaaagcggagaaagaacggcagaggaacgaacacaccgcaaaaatcggagcggaacgcttgcgcctccttatcccttcgaatgcaaaagccgtcattttgtcggtgaactacgggtgagcgagtgtgacagctatacggactaccacgactaccgtatagagagagccgtgattttaggtttttccacccatacacgaaacctcttttccgaaatgcgtaaatatgccgccaattttaagggaacggcttatttggcagagaatgacaaggaatacgaacaccgtgaaaattacagcatggggggcggtatgtatttggaacgcaacaagtatagcggttggacgatttcaaaaagagcggatttacgaccttgaaaagtttatagaacgatacacccacactgcaggggacgaagccaacatttatctgaaagcacctctaaaggaaagcgcagcgaaacagccgacaacattcgcagatctttcaacgctcaatcttgaaaccgtggaatacagcgaaaaggtgataggcgtattcgggaacaccaagctgataaaagatgtcttgaaaggcttgaacgatctgttttctgtacgaacttcatctacaacggtgaaaggtgtgcgggatggatatacagcaggaagcagaaagtacgtgagacactcgcaatgtatgccaacgcatagggacgaaaaaggcagggcggtttgttccaccctacctatcaaaattaattcaatcaatatcaacccattaaaatttatagttatgaaaacgaacaagaatgcacggaagaacaacaaagttcagaaattagagaaagaaacggcagtgaaagtaaccgctttggcaatcatccccaaaccgatgatattactttaaccgcaaaacgtacccacaactgccgaagcggtggggcaaaccatgcccaagacaccgcttgcaacggcaacggctgaaatagaccttgatatcacagccgtacacccaagtgcggataatcaccgcaagacgttcaatgacacatccttgcaggaacttgcggacagcattcgggaaatggggtcttataaaccattgccgtacgtccacgcacggcaggcggttacgaaatcatctacggcgaacgccactaccgtgcctcactgcttgcaggagcaaagacaataaaggcaaccatatacgaccatataacagacgatgaagcggaggacatgtcactaagcaagaacttacagcgtgagcaggtacgccccaccgaggaagcgaaagccttcaaacgcctgcttgaaaagggcagacacgatatgtactcactcgtcagccgcttcggatggagcgagaagtatatctatacacgtttgaaactgaacgaattgtatgcgcctatcggtgaactgctggataacgggacaatcaccgtcagtgtggccgaggaaataagcacctatgaagccaacatccaaaaggatgtgtacgagaaccacctgaagcagggcaatagggacgattggagcggttacacgctcaatcttttcaagaaacattctgagaaatactacacaaccgaccttgaacaatacaagttcgacaagacggaatgcaaggcgtgtgcacacaacgcagccaactacaacctttttgccgaacataatgggtgcagacattgtaccgtaaatgtctgggggtcaagaacgcagcacatgtggcaaaagaaacggagaaactattgaaatccgacccgaagctggtgattgcccgaccctattacggaagtcgaaacgacacggcactccaaaaattggacaagaaagggcatgaaatcgaggaactcgactataacgtatcggcaagggaatttcccaaagcacccgaagcaccgctaaaggagcagctctccgaaccgacagaatatgaacaagcggtacagacctttgaatagaaaaacgaggaatacgcccaaaaagtggaagaacttaaccgtagaaaggaagagggcaggataaagacgtacgtcagagcccaatgtataagtgaattaggattgcttatataatgaaattgctctactatttgcaattgtgataaacggttatgtagttcatttatctttttgaggtaaaagctatttcccgtaactaatccatctttccagcctgaatttgcaaaaagatcaatcatatgtgagttaaccaatttatccttcaaatctttatagtagatatagtctttttttgtattctgtattgttcataatagtttgccaaatctttaggaagaatatttaattgttcaatcattttgttggcactgttcagcaaacttttcttttgtcaccattcactataaatatcacttgtttctttatatgttgactttttcttattctgatttctttgggcctcttctaactcgtattggaccaatatttttaatcctgatgaatcttctatagcttgcaaaaaaacaaacaattccttttggatactttttttattcgcgttatagtcttttagtaaaaacacatattgataagtatggtatgttttttcgctttctttttttcaatcaacattttatataaatcactaacttgaaagtatttttgtgtcagtaaagtaatttcatggttattttttccataatctattgcatttttttctatatcttctacaattgacttgtatttattcatgaactcttttcctttttcctgcccaaataagaaatctgataaactggaactttttggtgtgtcaagttctttgccccgtgaaaatgattgaattatttttgcataatcttttgatgctttatctttatcggtgaggtcaagagggagtattttatttttatagagtactttgtgaaaataagaaatgcgttaccattctttaaaaaccaaatctttttcctccatgtattcaataatatcatctaatggaatgatacattcgtcatcttgaaaatcgatggcataaagaggcttcgacatggggcaaaatcatcttgttcaatagtcagccctgcttgtacaataaaagggcgtgtggctttagaagtgctttcaagataggcacttactgtaacaaattgtccgttggctatttctatattaacaaatgcatatccataatctaaagatttgccaggcgaccgcaaaacgagaccatcaggttctcgtctgtctttgactggtatggttgcggaacggaaaacggaagaaccaacaaatataagttgcagtaaatcggctataatacttttgccagaatcactatcaccaataaaatcagtacaatagggatgaaaaatgtaatcattcttttgatggtgtatgataccaatggtagacagactgtaaatacgaggatatttcttcatgtttattcttttttaagccattcgtctatgtgattaatataatctgcaaatttacgagtaatacgttgaaattcagggagattagtaaaatcgtcttctttcaaatttatccatctcagcttatggaaatttttgaatgcgtgttgtacttcttgatcaatacggatatcatttgttttagtaaaacgttctttggagccttttgttttgatcagcaaatgttgcacatgcttttaaggtcgggcatatccatacggattagagctacaaacttttttacagaaattagttccatgttatgatcgatataataagctttgtatagtaataaggcaataagaatatcttctttgggtaaaggtgaccgctcgatggaataattacttcttaatacaggatggtagagcgcgaaataataatgttcgttttcactaccagcaggaataatagttatattctcatgtcgttcgaaatagactgttagattatctacatatttatttagataaagaaaaagtgttttatctccttcatattgtatatgagcacctcttttcagagcctctaccaattgtgaaaacagctatctatagaagtaaagaggggggatgggtctgccaattgaattgttccgttatagggaattggaaactgtatttgtttatctgtaatctggcttttttcgagcaggaaatacaagaacttctctacttctgtattaaatatgtcacggttgagagaggcaaaaaactgttttattttaggctgtattttatcaatacgtgagtctaccattgctaaacggaaatgaatgccttcaaaatatgagatggcttcgcttatgagatcgtctacttcttcactgtcatcgcgtactggatgcgaaataagaatatcattcatcaggtcagtttctcggaaggctgctcttaattccctattttgctgacgtatggcatctatttgcttttttatttcctgtaaagccacgagcaaagtttctttatgtcttttgactttttcacttaaggctgttacagaacggtcaatctgctgattaagatagttgacttgctccagtaaaagagtttggggcttaaacaagtttactactgtaagccaattttttatttgctcttctgtagcagcaacttcaagtttttcatgcagttccgcacaagttatttctataaaagtaggattaaaatgctgagatatcagatggtatatcttatcacatacctgaaaaccaaaatcggtaaacatataggtttggctttcatcattatagataaaataaaattcctataactctagaatgtatgcggtataagttacccattgtaatcttacaggttcacctttgataagacttactgcttcaaaagcatgatgtatatctttctccttaaaaattccatgcttaaattctccattcttcatccgttcatataaccagataacagccaatcctttctttttctctggaaaaagaagttcatagaccttttctatctttaattgtttgaataaagattgcattgtagtaaatatttaaagttatttccaaactcaattattacagacatacgcaaaatattagaataacttcatgtaaacaggaaaatatttaatatttataattgattcatttgatatttcattaaaaaataaatatctttaaactgtcggaataaggtaaatgcctattaaaagaacatagaaattatgtaggtacaaaaccgagggcttttttcggagaagcttcataacatgctgaatattacgagttatttcaaaatttgttagttccgtaaataccgcaaaatgttgattattagtagattatagagtaaatacccaattttacatctccttatatgtaagattgggtatttttgtttttaataagtaattatatcatgaaagtaaaaaatgcttttattgttgtcttactaagtgtgttttgtatgacaagttgcaatgatgaaaagtttgaaattacaccttttcatttagataaaaaatcttatgagtgagataaatgtttatttgaaaaataatgaagctaagaaatgttgcttttttacatacaactatttagagcataaaatagatgagaatcttataagtaaggggtgttataaattctcagtcgggaaaaataataaccccaacctctcatatgaaacaattccatttttgacattaacctataaaacagacgaagatggcaaactaactaatgaaaatattactgcatcaggttataaattaaatttgataggttcttcttctgcaacatatagtattataagtaagtatttaggtgtggattgggaccaaatattaaagtttataaacacacgttcagatattgcatttgctcctacgatgtaaatgcaagaagaggatacggaatactcagtgaatggagatgtggctctatttcctcaaatacctgaaaatattttgaaataaggcattttaaatctttctcaacgtgttaatttaagtagataaagcgtttattttaagtagtacggtttgtgatatgagcaataagcagagttgctggttgcccgttctgtacaattaggatatatacattgtctatctcctgttataatttctagtatagttgaacatgaagaaaatagcagcgatatacttgtacttaaaaatacaatgatcattttctttttcatgatatcttgttaaatttatattattgttcagcctcgcaaatgactgcaaaaatagaaataaaaatgcaattcattgactatcagaattgcatttttgtttttttgttattgaatattatgttcttaatcctcttttcggtctgtttttcctctttttgaattctttgaatttcatcttgaaccattcaggtataggtattccatcaatgcataaccggaactttcttttctcatgtgggtttctcgtgcaatactttattgcttgtttccattgtattcaaataatggttgatttaggttgttttttagcggatcagtcatcgctatgtcgtacttacgttcgattttatcgatttggtaaaatgttagtttgaaataaaaataatctcatggatgggggtaaaatgaaactttgttgtcattctgtaaaaaataaggttattatgatgaaaaagattatagcgacacgatagtataaactataaaattactaactttaatttatttttcagtgaaaaaagtattattatttgctgttgttttttcttgtagcatgtgggctaatgctcagtgtgtcacatgggcaaccgaagctgggttatctgcaatacaaagaactgggtatggagaatgctggcgtccatccactcgtttaggaatatctgcagattataatgttaataatgtgttctctatgaagtcaggattatattatacttatagaggatactctgtaaataatggtggaacatatagtaatggagatgctacatggatagaaaatgtttctcagacaaggcattttttacaagttcctatttgggttaaaatctctatccatagcaacaattccactaaatttttctttgaaataggaccatatataggatattgtatcaaaaatcatattgatagtaatccatattatcttactataccttcttccggtttggttgaaggatatcctggtgtgggagaaagtacggagggtggtagcaaccagtttctatatcaacatgcgagaaatttcgactggggaatgacgtctgctgtaggtattgaaaatcggaggtggacagttaagcttcaatatgaaatatcacttggaaaagaatctaaaaatgataatataggtgtaaactataatagtttaaccctctctgttggttataagctaaatgtaaaataataaactaatatttcgttggactttgtatttgtaattatatcggtattttttagcatgcttttatacaaaatattctaagaaatgcttggaaaaatctctgaggggatatgtgttgatttattattctagttataatatatgccgctgtgaatatcagaagaaaagttattcacggcggttttgacttttatcttctttgtattcaactattcttctgtgttttagttggtctctcaagttttttatctatttttgctgttggaacataaatcaaagtataataataaaaatacatatgaaaaacctcagaagaacttttactgtattgtttgccgcagctttcagtatgcagatgttggcacaaagagaagataagcttatcaatcaggattggagtttccgtttttcccatcaagtaaatgctaatgctgcacgtagggtagacttgcctcatacttggaatgcacaggacgctttgggtggtaagcacgattacaagaggggaataggtaattatactaaaaaaatattcatccgtcccgagtggcaaagtaagcggctttttttacgttttgagggagcgaattgcgtgagcaatgtctttgtaaatggtaaacatataggtgagcatcggggcggttatggagcttttgtcttcgagataaccgataaagtggaatatggaaaagagaatacattgctggtacgtgtcaataatggcgagcagttggatgtaatgccattggtcggtgattttaatttttatggtggcatttatcgggatgtacatctgttgctgactgataacctgtgtatctctccgttagattatgcatcgtctggggtttatctcatacagcaacagattacggacaaacaggcagctatttgtgcacgcatcaatctttctaatggaacgggagaactccgaaaagcagtgctccggttgcaggttaatgatggaaaaaagactgtgtatgaaacggagaaggaagtaagtatgattcctcatacagatgtacaggtagagaatatagagttcatactgaagaatccgcgtctttggaacgggacgcaggatccattcatgtatcagacggtggtgaccttgattaaagatggaaaagagttggataaagtggaacagccgttaggggtacgttattacatcacggatcccgataaaggttttttcttgaatggaaaacatttgccgctgcatggtgtatgccgtcatcaggagagggcggaagtgggtaatgctctttatccggtgcatcacgaggaagatactcgtatcatgcttgatatgggggtgaatgccgttcgtctggcacattatccacaagctacctatatgtatgatttaatggataaatatggcattgtcacttgggctgagattccatttgtggggccgggaggatacgctgataaaggttttgttgatcagccttctttccgcgaaaatggtaaggagcagttgaaagagatgatccgccagcattacaatcatcctagtatctgtttttggggattgttcaatgaattgaaagagcagggagacaatcctgtagagtatataaaggagttgaatgctatggcacatcgggaggatcctactcgtcctactacttctgcaagtaatcaggatggcgcgttgaatttcattactgatcatatagcttggaatcgctatgatggatggtatggggccacaccggctacgcttgccacatggttggatgctactcataagaaccatcccgaaataaaaattgccatcagcgaatatggtgctggtgctagtatctatcatcagcaggactcattggtacaaactgttcccggaagttggtggcatccagagaattggcaaacagaatatcatattcagaattggaaaataataaatgaacgtccgtatgtgtgggctagttttgtgtggaatatgtttgatttcggtgcagctcatcgtatggagggggatcgttcgggcatcaatgacaaaggactggtaactcatgatcgtaagattaaaaaggatgcttattatttttaccgggccaattggaatccagaacctatgatttatatcgcagggcgtcgtaatgtgaatcgggtgaagccgctcgttgatgtacaggtcttttcgaatgtagaagaagtgatattgatagtgaatgactgtcagtgtagaaggatgaagccggacagtttgaaagtttgtttgttcaaggaggtccctctcagaaaaggaaggaatgaaatagaagtacgtgccagtgatagtaaaaaacaattgatagatcgatgcacttggatattacaataaaacaattgccgcagggagttatacatctatttctgcggcgattgttttttattagtttgatttaaccagtttgttcatcgtcttgtgttgattctacacgatcagaactgttgaaccgtcgttatagtagtattattttatctctattccataaacatatgggtggttttagcatcataatgatcaaaaaagaggctgtatcccatgtcgagtgtggcgatggtagccatatcttcgtctgtcaactcaaaattggaaatgtcggtgttttgttgcatccgttctatgtgaatcgatttggggatgatgatgacgccacgttggattaaccagcgcagagcgatctgtactatgcttttcccatatttgctaccgatttcggcaagtattgaattcgtgaagaaaccgttacggccctcggtgagcggtctccacgacatgatgcgtgtgccgaactcttttgcggttcagtctgttggttgaatacgtgtgtttccacttgattcacagctggaacaatctccatgttgttagtgatatagataaaatgatcagggtaaaaatttgagacgcctatggcgcgaagctttccctccttatatactttttccagtgcgcggtatgcactgtatcagtcacagaacggctgatgcaggagcattaggtcaatgtggtcggtttgtaagcggtccaaacttttgtcgatagaggctttcacttttttgtaaccgtagttggaaatccatatttttgatacgaggaaaatctctttgcagtcgatatcacttttacgtatggtattacctacaccttcctcattgtggtatgcttgtgctgtatcgatcatgcgataaccgatctataaagcactgcttatacaacgttcgtattcgttcggagaaacttgatagacgccataacctatctggggcatttcgacaccgttattcaattttattgtattcatattcttgttatgattgattattttcttctacaaaattacactttttctttcaggaagttgttatataaatttctgtttctattgttgtttttgcggatagaagtaattttatattcaaaaactgaaaaaatgtaattcaatccgtatttcttgtaaatataacataggcaagtcacgctaattttgtactgtgaaactattaaaaacagattagaaatataatatggagaagaagtttattgcaatgctagtgtgtgtggccttgatgggctgcatctttgtttccgcacaggatatttgtaaaactgtcgctaatgtaccgatggtacaattcaataatggtgtgttgatgccgcaattcggtttgggaacttttatgcaatcatccggttctatatgtgaacaatcgtgccttactgctttgaagatcggttattgacatatcgatactgctcatgcacaatgatgaagccggagtgggacgagctgtaaaggagagtggtatttcacgtgagaaaatttggattacctcgaaactttggccgaccgaatatggcgaaagtaagacattagaggctatagataagatattggaacacatgcaattggatttgttcaccagccagccggcgattttgtgggtgcatggcgtgatatgggaaaagtacgtgcattgggaatcagtaatttcgatgcaaatgacgaggtgttcgagaaaattatgatcgaatcgcgtgtaaaacccgcagtattgcagatcgaatgccactcttacgctcaacggttggccatacgcgacaaggtaaaaccttatggtattcacattacttgttggtttctgttgggtggtgcgatgtctaatggtgcgttgttcagtctgtcatccgataaatagccaaggtacatagtaaatctcccgtccagataattcttcgctggcatattcaaggagatttctctgtcattcccggagcatcgaacctcgattatatcaaggagaatattgccatttttcgatttcgaactgaataacaagaaaatggaacaaatatgttcgctcaataaagaaaaacgctttttcaacgttacgcaggaagaggtggaaaagatggtatggaatacagaacattaggactgagtggattgaggatatcggccgtcggtctgggctgcatgggtatgagtcatgtctacggtgcgcctgccgataagtgtaaaataacggaactattgaccgatgccgtagatatggggtatacttttttgacacgaccgaaatgtatggtacacaggacaggtcgaatggtaatgaagaattgttgggaaaagcgttgcagtcgttccgcaaccaaattgtgatagcctcaaaattcggcatatagtttgatggttttggcgtagccggtacacatgtcgtgattcccgatttgcagccttcagttatctacagttcggttgaaggatcactccatcgtttgcgtactgatcgtatagatctgtattatcagcatcatattgatccgaaggttgaaccggagaagtagcaggagtgatgaccgatctgatccgtaatgggaaaatcctgcactggggcatttcagaagctattgaagagtatctacgtcgcgctcatgcagtttgtcccgttattgctgtgcagaaccactattcgatgatggctcgccaatacgaaaaatgttccctctccttgaagaactagacatgggccttgtggccttctcgccacttgcaaacgggctgcttacgaaatgttatactgctgaaacacgatttgatgttcgaatggattaccgtgtcgttatgcctcaattccagatgaagagttttgagcagaatgaatcgttgttttctcttattgaccgtttggcggaaaaataccatgccatcccgtcgcaaatcgcgctgtcgtggacgatgaacaaacgtccatggattatacctattctaggaacgtgctatctgtgccggcttaaagaaaatgctggtgctgctgatgttcacatgactgatgaaaaagtaaaggagatagatattgaacttgaaatgatggagatgagcgaagtgttcggaggatcgcccataaaaaatcctgaattcaaacagacaatgcaacagtgtcgaattcattgttagttaataatttatatttttcctttggggtcatgtaacccaatctttttctcggtcttgagtttaagatgttttgaacgcgcattacctgttcattggttatgtccctaaagtccgtacccttcgggaagtattgcctaatcaaaccattgctgttttcattggctcctctttcccacgagtggtatggttttgcaaagtaaacaaaaatatttagtttacgtgcaatttcttcgtgaaaactaaattcttttccattatctgccgttattgtatgtatttggtctctaaaaggttccaaggcatcgatggcagctttagttagcgggctggcatctttcccgctaagtagtcttatccatactagtccagttaccctgtcgtttatagttaatagtgctcctttgtgattcattccaatgactgtgtcaatttccaaatcaccaaaacgtactttcttgtctactatcgtaggacgcttgtctatgtccacgcggtttttgataaaaccacgtccattagtcaatgcacctctcttcttatgacttcttccccgtcttcttaaatgcttgtataacaacttatctccatgctttttatcttcccaaatatactggtagattgtctcatgagaaactgtttccaagccctttgttcgcataaacccagtcacttgttctggactgaaatctttctttatgagtatatctacttgaattttcaagtcgtccgtaaacttcacgaagtgctttcgtgaacgcattctggacatatacttagcctgagcgagatccggtttgtaaatgccattacgtttatcactattacgacgtaattcacgacttatagtgctacgatgaactcctacaagattggcaatctcggttcttgactttccgctttgcagataagcggaaatgttatacctttgttcttcggttagctgtttcatattgcaactgaatgttggggaactggaagatgcaaagaaacaacttttccacaggggaacaaaagggaaagaaatcttctttctctgttcctctgaaaaattattcttttcgtatcttctcattgtcatcattctcactcctgttgcattatccgcttgaacttaggaataactattccattgtagaattattaaaaaatgtaaatgcaatggctttatagcagcagtcgcttgagattctgtatttatggttatttctgtttttattaagcaaacggtataaaagtatggaagagtgtaaagatattatggtaatcgattgggctacccggattccgaccgatgccgaagaggagtatttgtcacatttgttctgtttgggagggggatgttgatatcggttcaacggaatggattttgagttgcatgctggcgatctgtcgattatccgcaagcggaaaatgattgaaaatatagaagtttcaatggatttctgtgccaagattatctatgtgaagtctggatttgttgaactatgtaaccttagagcaattatggaatgaaaggacaactggccttttcctcaactctgtcatgcacctctcgcttgaacagcagattgtctgtcgtcgagatcttgaactgcttgagttgtgtatcaaggatactgaacatcgtttctaccgtgagatgcttatcaacgccatgcagacggctatccttgattttttcgattttcatgctcgtatctatgatgaaagcgacatttcaacgcagatgcctccatcatacatcgtttcttgagaatgctggaggatggtacataccgcgaacacagggaggtatcttattatgtcgattgtttgtgcattacgtcgaaatacttgtcggaagtgttaaaaaaggtgagcagatatgccgccaactattggattaaccgttatacaatatttgatatttcacgcctgttgagtgataagtcattgtcgttcgtgcagatttccgatatgttcagcttctcgtcacaagcctatctcagccgttatgtacaacagaatctcggtttcaatccgacggagtacagaacataaatctattcaatcagacgttactgatgatagttggtagcattgctgatatcttattatacaacggaacaatgttatagccgtgtcacgggtacacaggacaaggaattgacttttatttccgatgcaacacacatcaaaatctactacgtgccggagtatgtgggtacggcagttaggggggaatggagtttttcgacaaggagttgtaacttttcgttaactttttcaaacacgacatattgacttatgttgcgacagatgaagaatatgacaatcaatagttcagcgtgatagcatgttttcccaatgatacttccgcaccagaaacagaacagttaacaatgcccgaaaagctaggaagtggagagaactggagtgatttcgattatccggctgaaaaaagtaagatgcttgtggcttacttctccgcgcagggacacacaaactgtggccgaacgtattgtggagcttaccggtgcagatgtactgcattaaggttgccggactgtatgccgtccatacaatgacaacaacttgttccggggcttataacaatttgtaatcaggtatgtctgatttgcccgatgtggaaacggtagcgtagtattatatgatttttcgttgattcgttttgctagtggtaccaacctgtgtagcctatacatttcttgagatatacgatttgaaagagtgattggtgatgctgtcgtttcttttgggaggctctcgctgacattgtgcgaggggaaaacagcatccatcgtggaaacctctgtagaccgaatgacttatcagactagtagatgcctgtttctccaccagtaccatataaatcgggtaccggttgtaattagggctactgacaatcctgtataaaatacagcaataaatgcttctggtagtacatgcagggtgcgtgtcaagatacctatggtaatcatgaatcccatgataatccacccttttacatcgaagaaagagaatggacaattcttggatttcttttgagatatgcgatgagtatgtttcttgtaaagtttatgaaatatcagaccaaagaataaaagaaatactatagtggcttcacagattttgaagaaccaataatgagaatcgtttatccagcaacttattccaatacgcaagatattgataccggctaagagccaaactatgcctgctgtaataactaatgtattttttgttactccgtatttcatgttagcattaaaaataatgagtagcaaagatacgttttttttaatggatcatctgatagatggatagttttttatttgtaaacggaggaataacacaggtttattttttttgtataaagagaattatagaatttacttatttattgtttttgatttcgttcttgctttaaatggtggttttgttttttagtgtgtttgcaagtttgccttccgtttttttctttttccgtttttttttacgcgcgtgcgaatattataatgtgtctgtctttttcctcccgtgtcctccgttataaaaaccttctttgtaagacatctgtgattcagcgtattacaaaaaagtttcagggaatccggataatttgtcttgtgaaagtttgcctgttagcgttaaaaggtctacttttgcacccgcaatcgagagagatgcggcacttcagacagtgttactgacttggtgaaacaaacgtgggagattttccttgatagtgatctgcacctggtatcttaccttagcggggctaagggagcgagaacggataagacctcgggaggatgggtggtccgccttttatggaagtttcgaaaaaaaactttttcaaaaaaaactttcgaaaacatttggtggttacgataaaatctcttacctttgcatccgctttcggaaacgatggcaaacaggaataagagttctttgaaagatttaagataaacaaacaagtagtacaagccggtgcaccgtatatataatatggtgtacggaaaaacaagaaccgtcaatatttttattgtattgatagatttggagtccttgagcgtaaagtcaacttaagtgttgaaaagaatatttttacaatgaagagtttgatcctggctcaggatgaacgctagctacaggcttaacacatgcaagtcgaggggcagcatggtcttagcttgctaaggctgatggcgaccggcgcacgggtgagtaacacgtatccaacctgccgtctactcttggccagccttctgaaaggaagattaatccaggatgggatcatgagttcacatgtccgcatgattaaaggtattttccggtagacgatggggatgcgttccattagatagtaggcggggtaacggcccacctagtcaacgatggataggggttctgagaggaaggtcccccacattggaactgagacacggtccaaactcctacgggaggcagcagtgaggaatattggtcaatgggcgatggcctgaaccagccaagtagcgtgaaggatgactgccctatgggttgtaaacttcttttataaaggaataaagtcgggtatgcatacccgtttgcatgtactttatgaataaggatcggctaactccgtgccagcagccgcggtaatacggaggatccgagcgttatccggatttattgggtttaaagggagcgtagatggatgtttaagtcagttgtgaaagtttgcggctcaaccgtaaaattgcagttgatactggatgtcttgagtgcagttgaggcaggcggaattcgtggtgtagcggtgaaatgcttagatatcacgaagaactccgattgcgaaggcagcctgctaagctgcaactgacattgaggctcgaaagtgtgggtatcaaacaggattagataccctggtagtccacacggtaaacgatgaatactcgctgtttgcgatatacggcaagcggccaagcgaaagcgttaagtattccacctggggagtacgccggcaacggtgaaactcaaaggaattgacgggggcccgcacaagcggaggaacatgtggtttaattcgatgatacgcgaggaaccttacccgggcttaaattgcactcgaatgatccggaaacggttcagctagcaatagcgagtgtgaaggtgctgcatggttgtcgtcagctcgtgccgtgaggtgtcggcttaagtgccataacgagcgcaacccttgttgtcagttactaacaggtgatgctgaggactctgacaagactgccatcgtaagatgtgaggaaggtggggatgacgtcaaatcagcacggcccttacgtccggggctacacacgtgttacaatggggggtacagagggccgctaccacgcgagtggatgccaatccctaaaacccctctcagttcggactggagtctgcaacccgactccacgaagctggattcgctagtaatcgcgcatcagccacggcgcggtgaatacgttcccgggccttgtacacaccgcccgtcaagccatgggagccgggggtacctgaagtgcgtaaccgcgaggatcgccctagggtaaaactggtgactggggctaagtcgtaacaaggtagccgtaccggaaggtgcggctggaacacctcctttctggagaggatccaaagtaaaggtttttgtttttgtactgctgttgttgtttattcaagatatgattccgtattaagacggaagcgagaaagtaagaagccgggtctaatgaaacagactaggttgaacttagtcctatagctcagttggttagagcgctacactgataatgtagaggtcggcagttcaactctgcctgggactacgaatcttgagattcgggggattagctcagctggctagagcatctgccttgcacgcagagggtcaacggttcgaatccgttattctccactccatcagaaacgtaagatacgaagatgaccgatctatgacatattgtacaagcaaacagtaattttagtagtaaagagctgaaagtatatatcatcccgctggcacgcaagtgtgggcgaatgaataaggaaagtaaagaagggcgcatggcggatgccttggctctcggaggcgatgaaggacgtgataagctgcgataagctccggggaggtgcaaataacctttgatccggggatttccgaatgggacaacccggcgtgttgaagacacgccacctgatcatttcaggagctaacgcagggaactgaaacatcttagtacctgcaggaaaagaaaataacaatgattcccccagtagtggcgagcgaacggggaatagcccaaaccgttcatgttacggcatgatcggggttgtaggactacgtcgttgcatgaagacatcggagaagaactttctggaaaggaagaccatagagcatgacagttgcgtattcgtatgttgtcgaagcatagtagtatcctgagtagcgcggagcacgaggaattctgcgtgaatctgccgggaccatccggtaaggctaaatactcccgagagaccgatagcgaaccagtaccgtgagggaaaggtgaaaagcacttcgaacagaagagtgaaatagttcctgaaaccgtgcgcctacaagcggtcggagctgcttaaagcagtgacggcgtgccttttgcataatgaacctacgagttgcctttgccggcaaggttaagtgtgacgacacacgtatccgaagcgaaagcgagtctgaagagggcgtatagtcggcagtggcagacgcgaaaccaagtgatctacccttggccaggttgaaggctgggtaacaccagctggaggaccgcaccaataagcgttgaaaagcttctggatgagctgagggtaggggtgaaaggctaatcaaacttggagatagctcgtactccccgaaatgcatttaggtgcagccttgtgggttactgatgtgaggtagagcgactgataagatgcgagggcttcaccgcctatcaagtcttgacaaactccgaatgcgcatcagttttacctcaggagtgagggcatgggtgctaaggtccgtgcccgagaggagaagaatccggaccacctgctaaggtcccgaaatgacagctaagttaaactaacgaagtctgactgctaagacagctaggatgttggcttggaagcagccattcatttaaagagtgcgtaacagctcactagtcgaggagtctggcgtggataataatcgggtattaagttgtctaccgaagcagtgggatcattgaaatgatcggtaggggagcattccagtcagcgtcgaaggcgtaccgcgaggtattctggagcgtctggaaaagcaaatgtaggtataagtaacgataaagggggcgggaaaccccctcgccgaaagactaaggtttcctgatcaacgctaatcggatcagggtaagtcgggtcctaaggctcagccgaagggcgatgccgatggcagaaacggttaatattccgttactacctccaggagtgatgtggagacgcagtagtgacaatgccgccatctgacggaatagatggttgaagggtgtagatgttgatcttggcaggcaaatccaccatgagaatcgaacctgatagtatgccgcgtccctcgggacaaggcaatagtgcatgtaatcatgctgccaagaaaatccgctaaactaaatcctgtaggtacccgtaccgtaaacggacacacgtagtcgggatgaatattctaaggcgcttgagtgattcacggttaaggaactaggcaaactgaccctgtaacttcgggataaagggtccctacccggtgacgggagggcgcagagaataggtccaggcaactgtttaacaaaaacacagggctgtgctaaatcgaaagatcctgtatacagcctgacacctgcccggtgctggaaggttaagaggagacgtcatcgttgagagaagcgttgaattgaagccccagtaaacggcggccgtaactataacggtcctaaggtagcgaaattccttgtcgggtaagttccgacctgcacgaatggtgtaatgatctggacgctgtctcaaccgtgagctcagtgaaattgtagtatcggtgaagatgccgattacccgcgatgggacgaaaagaccccgtgaacctttactatagcttatcattgaatctgggcacgtgatgtgtaggataggtcggaggctttgaagggggtacgccagtatccttggagccgctgttgaaatacgacccttcatttgtttggattctaacccgtgtatatggggacactgattggtgggtagtttgactggggtggtcgcctccaaaagcgtaacggaggcttctaaaggtgccctcacggcgattggtaaccgccgttagagtgtaatggcataagggcgcttgactgggagactgacaagtcgatcaggtaggaaactagagcatagtgatccggtgtttccgtatggaagggacatcgctcaaaggataaaaggtactccggggataacaggctgatccctcccaagagctcatatcgacggagtggtttggcacctcgatgtcggctcgtcacatcctggggctggagaaggtcccaagggttgggctgttcgcccattaaagtggcacgcgagctgggttcagaacgtcgtgagacagttcggtctctatctatcgtgggcgtatgaaatttgcgtggctctgacactagtacgagaggaccgtgttggacagacctctggtttaccggttgtgccgccaggtgcattgccgggtatctaagtctggatcggataagtgctgaaagcatctaagtacgaagccggccacaagattagatttctcagggtcgttgtagactacgacgttgataggatgcaggtgtaaagatggagacatcaaagccgagcattactaattgcccgtccactttccttatattttggatggtgtatacgttcggttattactacaggataagataacgctgatggcttgtcgatatgtcgctcttattcaggtggctatagcacaagggttccacctcttcccattccgaacagagaagttaagccttgtcacgccgatggtactgcgtcacagtgggagagtaggtagctgccgtttttgattgaagcctccggacttgaagaagttccggaggctttttttttgcatccacgtgtgtggcggagtctagtaacggaaataatcctatgttctgtaacatgaatatggtatatttttctctttttgcagtacttttagtgtaaattctatcattaaattctttttctatcattgatttttgtacttttgggctattctttttgaatttattgaagaaagaaagtgttaaactcaaaaaaataagaagttttgcttgacactcatgttttagggatatttattgaatctcccactttagaagatcagtgagagatgcactttcttcttcgttaagttggaaaaccttgggttccgaattatgctgttatacttttagcataacaatataaaggagttaagaacagtactgtctgttctctttcttatttatatgtataagctagtgctgctcccaatgccgtgcgatattctgcatattcgggtatccaaaaatggcattgatacattttttccataactgggaatatttctttgcattgtggcattttggtcaaattacctatcaggacaaaatctttgatatggctattcagtgctgctaatatgacagattgtcctatcgattgtaataccatatgaatgattcccgctgctacatcttccatagaggcatttgagcttgctttgccaaatgtggaagcggtggcatccaaaggaagtcccggtagaggagtgttgcaaatatccttgatttgcaaatcaatattttctattacacctttctctgccatcttcaccacttgatgaatattctgtgtttttaacaacaggcaggataatccttgaatggttcctccaccaatacctataccacctatgtgagatatattttcacctccttccacttttacaaaagaggtgccggtacccatgcttactacaataaggtcttgtagttgggagtcatagtgagctccaaggccgtttgctagaaactcatccgtatgatcagtagagagtccatataatggttggtttacgtaagcacttcccactcctgtcaacatgactttatcaatgtcgtttaagctgattccattatcatatatgtatttgccaaaagcaccgaataacgaagtgataggatcttcggcttttacaatcataggatgttttatgccttctttatccacacctattattttggtggtacttccgcctacgtctatacctattaccattcccattgtttttctttgtttattctaaaagagtgcaaatatacaggaattatctaagtgtttattcatatagcttgcgataattaccaattatctgttcggaatggggctactggcagacctgatgctccgaataaagcaccgtcagtatggttggcccaattgtatctcacggctacaggatgaggtacatcgggtgattgtacaattatttctttcttttttactgttactgttgccggataaaaaatcctatctgtacctgcaattataaatccgcgtactggatcgggatgcaggaatccttttcctagattttcaaaatggatacgaagggtatttccttcgatgctgtagcttttgtaaaccggatattgaggcatttttctttttccgtaggtttgttttaatgctagctgtgataggcgaagacctgtttccagagtgctttggaaggtattgctttttccttttccaatatcggtggttactaccatgcctgtatgattcaagtgtaaagcctgtgcttgtgcttcacgtatggccgcccagtctgaatcatcttgtatttcttcttttttcccatgattggacagttgtacaaagtagaaaggcatttgtggtttctgccacttatcgcgccagtcggctatcaatgacatgaataagtctgcatattcatcgctgcttcccaaattactttttccttgatgccatacaataccttgaagagggaaaaaagtaagcggatgtatcatcgcattgaataatcctgtgggatacttagggttactttctggtgaaatgggtataggggggattccacttaatgagagaccggacaggtatttccattctcctgccaatgagataagattcttgccttgtatacttagtttcatgtcttctggacggccatatattcctcctttgcttttgtaattggtcacacgtatggtcagtacagcctttccgcgttttaccagcttatagggaattttgtaacagcaggacacatcggcttttgtgtttcgtcctatttcagtcccgttataatatacaatgctttcatcggcaatgttccccaaatttattgtgatattttttctagtccagttacgtggaatatctatcgtttttctgaaccatactactccatcgaagtctttcattcccttatcttcccagtatcccggaagttccattgttttccagttttcatccgaataatcaggttccgcccatacttgatggtcaacgcaccatcccatatcgtgttcgtaaagagcttgataccacttttctcttttacgggcatattctgcttctattttttcaggattgaactccaaggattcaagcatttctgtttctttgttgtagcttggcaggtcttctaacgcatcataactggcccatgcttctgcaggagtatctttccaggtacaacttattatacccacgggtactttcagagtcttttgtaactggctggcaaaaaaatatcccactgcagggaatccggttatgtttttggaggtgcattctttccaaccttcttgtgtagtgtgtaaatctttcttgggaactaaggagatttctttctttgtctggaacagacggatataaggttggggggctatatctatgggagtttctgtttcacattctcctgtatacaaccatatttcaccaattaaaatattttgcagtatgtgtttatccccgtccgaaatgatgatttcataaggacctccggcagatggggtaggaatttctattctccaatttccttctttgtcaggtgatgtcgtatagggatgcttactccatcctgttgttattatcacttctttttttgtggatgaatggccatggaaaatgacatttgatttttgttgtaatatcatattgtctgtgaataatgcaggcagtgttactttggcttctgtcatacaaaacgccattaacattcctaataagatcatttgttttttcatgagtgctaaatttgttgtgttatcaggcttatggtatctatttatgctggataagtccccggtctttgaatatgagttgtaccagacggaaagccaaatctgtaagcaatattcccaaggcggcaccaatgatgacatcaaacagccagtgacggttattcagaatacgggtaaaccctgttactatagctgctgcgtatgctactaatcctatccaatatcctttgaacccatattccttatacaataaggtagctgccataaatgctgctgccgtatgtccggaaggaaaagagaaataatttgtggcatccgggcgaagcactccggtggtgagttttaatccgtttactaccagctgtgtcagtatgactgacaggactatgaaagtgaacaaccgtttccatccgaaacgacctcttattcctcccaattttagtccgaatagaagtatgagtggaaaaagttgcagataattgtcataagtttgatggaaagccggaacgtgtatattacgcaaattacgtatgtatagatttgcattctcgaaaaaatgggagaatgttccgcttccgtcttgcaaatacactgcaataacaagtaatacagctatgtaaaacgtgatgattgccatcgttttaatttttcctatcataagtcagtttattaagtactacggatgaatgccccgaaagtactcattttctcttttatctattaatgtgttaatgataaattttgttcaaaataagtttctttaggactcttatggtttagccggttcttccttcatttcccctttgctatatccgctgggacttattttatagtattttttgaatacttcgcggaaatattttacatcattaaacccggtcatatctgatatctcggatatattatactgtccttcggatagtaattgtgctgcccgtttcagtcggatcaggcggatatagtctgccggagcttgatctgtcaatgctttcagtttattgtagaaactggaacggctcatgttttgtgaagcacagagtgactccacattgaaacttgaattgtctagattttcagttattgtttctttcactgcttctaggaactgttggtccaatgtgttgctataatttatggaaatactgtcattatgtaactccatatctgcatatttgcggcgaaggagtgcacggttagtcagtatgttggctatagatgcttttagtattcctatattaaaaggttttattaggtatttgtccgcacctgtttctaatccttcaacgatattcttttcatcatttaatgctgttagcagaattacagggatatgagacgtcagtatattatttttgatagcagaacacaattcgtctcctcgcatttcgggcatcataatgtctgataatactaaatcaggtttaaattcagggataatttttaaggcttctttgccattggtacacgtttccacttgataagcttcggataaagtatgaaacagatattcgcgtagatcgtcattgtcttccacaaccaggatacgctgtgtattttgaacatgctgccgatacagatctttataagtatggggagagactgcactaggagatactggtgccacgttttcttgttgtaccgtttctgtcgggacctgttggtttcggaattgtttttgggggaagataacctttacacgggtacctttattctctacgctttctatgctgatctttcctttatgaatacgtactagtttccatactaacatcagtccgattccactgcctgtaatttttgcattgatggcattgctgcccctgaaatgtaacttgaataactttttttgttctttggcaggaatcccgatgcccgtgtctgtaatctccaggctccagttgtccttgtcatggcagatgataatgtgtacctcaccgtgggcgggagtatatttgatagcatttgaaatcaagttttttgtgatcgagtccattttttctttgtcgaaccatacattttgatattcaaagttgcttttgtagtcgagtttgatctgtttggcttctgcataactataaaaggcatggcatattccttccatataggtattaagttcatgttccgatatacggagggaggaggagtatacattagctttgctgaagtttatcagattagtggtgaggcgtagcaaggtgtccacgttcttcatcgctgtaagcatattggcctgactttcttcacttaaattttctttttgttgaatttcttccaaaggtgcctttattagtgtcagcggagtacggatatcatgcgctgtattgataaagaaccgagttctttcatccgaggccttcttttctctgcgcatggaatgcaggcggaaaatgacgtatgttactgaagtgatagtcaggacataaatacaaatagcccaaaaactgagccacacgggatgtgctacagtaattttcaatatccgctcctgcaacacgtgtttattatcctctttagaaacggaacgtacacgcagtgtataggtaccgggagcaacattagtgaatcggatagtcccttcgtcacttggagtagtccaaccgtcgtagaatccttccaactgccaggtatatagtatgtccgacggataatcgtaattgatagaggatactcggatagaaaatgtattttgcatatatttcagattcaatttctctatttgatcgatatctttagtcagaggagagtttggatcattaggatatacagtttggtagaaaatatggaagtcgctgaatatcatatgtgaatctcctgtttggggcatttctatgttttgggggaattccagtgcaccatctgtacttccgaatacagtgttcccattggcacgtagtacaccagagccggcattgaaacaggtggacatcaacccttgtccgcgagtccagttgcggaactggcggttagtaggcgagaaaatactgataccattttcggtactcatcaagatattcccgtcttttgtgggtagaataacataaatactgtttgatactaacgggctgttttctgtgtggtaatgggcgctgattgattcttttaccggatcataagtaaatagtccggagccactggtaccaatgtagagtaaaccattgttttcttggtgtaacgtataaatgtaggttgctccaccgggcagatgtatttcattgtatttacccgaattccggtccagtagaaaaagattggtggaggtacctatccacatagatgtactatccttttcttcaatggcagtgacggaccctagtccgggataaagacgtccttggcgtgtctttagattaaagcatttcagattataatatcctccggaccatatgcacccgtatctgtcctttttaatgtcgcgtatgtatttgtcggcacgtacattcagatggaaagattgggcaggggtgaggtattctatgtttccgtttttcttggtaatctggaaaatgcccgatgcatatcctccggcccatataatacccggagaaacttcgcataaagtgataaaaatgcggttctgattttttagtccgtgattgaaagagcttagaaaagaacgccattgcttttgctttgaatcgtataagctgatgccgttgcttgttccaaaccacagatccccgtcactatcttctataatagagtttacttggttgtttactagtgactgccggttgccaatagagtgctttatccagttgtagttggtatattggttattgcggacggtaattcctgtaggatagctagacagccagatacgctgctcgttgtctacatatacatcattgataatgttcccgtccatttcgttgtaactaccataatttgcaatgatataaggttcggtttcataggtatctatgtttaatttgtgcactcctgctccttcagtggctactaataattcctttgtgttcaagggactgagccgtgtaatattcacatctgttagttctacttcgggacgtacaattttctggatatttaagtcatatatatagactcccttttcaaaagtgcctataaatagtttgttggctgtacggtgtagatataattcgtgtacgtgcatatccatcatttccagtttgccgcaggagagttctttcaaattcccgttttccagttttaccagatagattcttttgtctgtacctataaaaaaatgttcactgtttatctgttctatgcaggtgatatttcccagccggttagaaattctttgcttttgtccggattctatgttaaaaaggtggatagccgatttgccgcacaaccatacgttactctcctggtctatataactatatctcacgaaagcatggtagtccttgttccagtaattgtacatactgtatatctgtacaaaacgatcgtgtcctgaatcataacggaaaattctgccttgttttcctgtgaccagcagtgtacctgttttatctaaataagtccagtttatattcaataacgggtctagctccctgtcgccttcttttaatttataatgttttatttcttttccgttatatcggtctattcccacatgggtgaggaaccacatgtatccacgcgcgtctttttgaattctgtatattttctgattacttagtccttcttctataccaatatatttataagtctgcgatgagacggctaatgacaatagcaaaaaaatgagacttgcgatagtagctttcataaaactctttattctaaatcttttccttttcaaaaaacagtaacaaatttaagataaaaaaatcataggactagtaatttgatatgatctaaatttcggtaaaattatccctttgttcgcctatagcgtcacttgtttagatgtagaaaatgcaaatggaagaatgtttgtaacattactgtcagatgattatgttttcttaacaaaacttcgtgcagcattatggtatagcctgcatttctttcaatagaaaagacttataaactagaataattaactaataaagaaaagcacaatgaaaaagttttttggttttaataaattgcttgcgtctgtagcggtacttgcttctgtgatgatctttcaatcctgtttggatgatgatgataatgattattacagatacgcgtggcccaatgcattggttactgtgaaaccggtggccgacaattcattttttatgcagttggatgacagtacgacactgttgcctgtcaatatgaaaaattctccttatggtgagaaggaagtaagggctcttgtaaatttcgatccggtgaatgagtcaagcggagagtatgacaaggctgtacatatcaactggatagacagtatcttgacaaaaccgattgccggtgatttaggagataagaatgatgaagtgtatggtactgaccctgtagatatgattaacgattgggtgacaattgccgaggacggttatttgactttgcgtttcagaaccatgtggggggatcgcagtcaagctcattttgtcaatttgctgatgagtaaagatgctgaaaatccttatgaggtagaattccgccataatgcctttggtgatgtatacggtgaacctgccgacggactggtggcatttaatttggattctttgcctgacactgaaggaaaaacagtgaagctgaaattaaaatggaaatcatttaacggagagaaaacagcggaatttgattattgtacccgtaagtcaactcctgcaaacaatgcagccattacagccggacgaagtgtcttgagattaaaataaggttttataactgaggtgcaatttcaatccctcctgttctatgtggtatagagccggagggatatttattttgctctattcgctcatccatatccctagcattactccgaggatacccaataccacactgctaatgatgtatgtgaaaaaagaggggtagagtcctgatttcagtaattgcaaactttcgttgctgaaagtggagaaagtggtgaagccaccgcaaagtccgatagtgagcatcagtcttatatcattgttgatatgaatgcgtgaggtgagggtataaaataccccgataagtatgcaacccaaaatattgactgcgaaagtaccccacggaaaattcgttgctccctggcgataaatacttatggtaagcaggtagcgaagtacacttcctgtacctcctcccaagaagatgagtaatagtgatttcataaatgctacattttgatgcaaaaatagcaatgattattcattcagagccaaacttttttagtaattttgcaccctaaacgaaaaatacgcaaaaaggaatgggtggtttttttggaacagtctcaaaggctgaatgcgtcaccgacttattttacgggacggactataattcacatttaggaacaaaaagaggtggtttggctacgtatgctcaaggagagggctttatgcgctctatccacaatttggagagctcttatttccgtacgaagtttgaatctgaacttccaaagttcaaagggagttcgggtatcggcattatcagtgatacggacccgcagcctatcgtgataaactcgcatctaggcaagttcgccatcgtcacagtagctaaaatcaataacattacggaattggaatgcgacttgttggcggctaatatgcacttttctgaaatgagtcttggcaagacgaaccagacagaactgatagcattgcttattgtgcaaggaaaaaattttgtagatggtatcgagaatgtttttaataaaatcaaaggatcatgctccatgctgatattgacggaagatggtattatagcagcacgtgacaaatgggggcgtactccgattgtaataggtaaaaaagagggtgcgtatgctgcgacaagtgaatcaagcagtttgccgaatctggattatgaaatagagaaatatgtaggaccgggcgaaattattcgcttgcgtgccgatggaatggaacaaatgcgcaagccgaacgaaggaatgcagatttgttcttttttgtgggtatattatggatttccggtttcatgttatgaaggaaaaaatgtagaggaagtacgttttatgagtggttataaaatggggcagaaggacgattcggaagttgattgtgcctgcggtattcctgattcgggggtaggtatggcattggggtatgctgaaggtaaaggaattccttatcatcgtgctattgccaagtacacacctacctggcctcgtagtttcactcctgccaatcaggaaatgcgttcactggtagcaaaaatgaagctgatacctaatcgcgcaatgctggaaggtaagcgcgtgttgttttgtgacgattctatagtgcgtgggacccagcttcgtgataatgtgaaaattttatttgattatggtgctaaagaggttcatatgcgcattgcttgtccgccattgatttatggatgtcctttcattggtttcacttcttcaaaaagtgatttggaactgattacccgccggatgattaaggagattgaaggcgatgaaaataagaatctggaaaaatatgcaacaacagattcgccggaatataagaagatggtacaaatgattgccgaccgctttggtctgagttcgttgaagttcaatactttggaaactttggtagaagcgataggattaccaaaatgtaaggtatgtacccattgttttgatggctccagttgcttctaataacaaaataataaaatattaataaaaaagagctgtgatttgtttggcaattcacggctctttttctatttttacaggcaagtatgaatattaaaacaaaaagaaaaatgacggtaatagaacgatttttaaaatatgtaagcttcgacactcagtctgatgagaatagcggagttacccctagtacgccgaagcagatggtgtttgcgcaatatttaaaatcagaattggaacaattgggctttcaggaaatttctttggatgagaatggttatctgtttgctacatggccggccaatacggataaaccggttcctgccatcggatttattgcacacatggataccagtcccgatatgacgggtgcaggagtcaccccacgcattgtctatggttatgatgggacagatattgtattgtgtgaagaagacaacgttatactttctcccaagcaatttcccgaattgttggatcataaaggggaggatcttattgtaactaacggcaagacattgttgggagctgatgataaggcgggcattgctgaaattatctcagctatggtatatctgaaagaacatcctgaaatcaagcatggaaaaattcgtgtgggatttaatcctgatgaagaaataggcttgggtgcacataaatttgatgtggagagattcggatgcgagtgggcatatacgatggatggtggtgaagtaggggagttggagtttgaaaactttaatgccgcttctgcaaaagtgattattaaaggacgtaacgtacatccgggatacgctaaggataaaatgatcaactctttgcgtgtagctaatgagtttgtggctttactgcctacggacgaagtgcctgagtgtactgatggttatcagggattctatcatttgattggcatgacgggtgaagtagagcagactactatctcttatataatccgtgatcatgaccgtgccaagtttgaggcatgcaaggaaaatatgaaaaaatgggcggaaatcatcaataagaaatatggagaaggtaccgttaccttggaactgaaagatcagtattacaatatgcgtgagaaaattgagccggtgatgcatatcattgatgtcgctttcaaggctatggaagaggcgggcgtgacacctaaggtgaaggctatccgcggcggaacggatggcgcacaactttcattcaaaggattgccttgtcctaatatttttgccggtggcttgaattttcatggcagatatgagttcgtgccaatccagtctattgagaaagctatgaaagtagtggtgaaaattgctgagttggtggcaagataagtaatttattaaccttaaaatagtaaagtaataacatgaaaacaactccgtttaccgaaacacacattgccttgggggcgaaaatgcacgaatttgcaggttataatatgcctattgaatattcgggaattattgatgaacaccttacagtatgtaatgccgtaggtgtttttgacgtatcccatatgggtgaattttgggtaaaaggtcctaatgcgttggagtttttgcagcaagtgacttcaaacaatgtagcaactttgcctgtcggtaaagcgcaatatacttgtttccctaatgaggagggaggtattgttgatgacctgttggtatatcactatgaatccgaaaaatacttgttggtggtaaatgcagccaatattgagaaagactggaactggtgtgtcagtcataacacagtgagtgcggaattggaaaatgcatccgaccatatggcacagcttgctattcagggaccgaaggctatggaagttttgcaaaaactgactccggtcgacttgtccgaaattccttattatgcttttaccacaggtgagttcgctggtcagaaagatgtgattatttcgaataccggttataccggtgcaggtggtttcgagctttatttttatcccgaagccggtcaggctatctggaaagcaatttttgaagcaggtgctcctgaagggattaaacctatcggactaggggctcgtgatacattacgtttggaaatgggcttttgcctgtatggtaatgatttgagtgataccacttctccgttggaagcaggattgggctggattactaagtttgttgaaggaaagaatttcatttcacgcgctttacttgaaaagcagaaagccgaaggattgaaacgcaagctgattgcttttgaaatggtagaccgtggtattccccgtcatggttatgaactggtaaatgctgatggagagaaaataggtgaagtaactagtggtaccatgtctccaatgcgtaagattggtattggtatgggatatgttcagaccgcttacacagcattaggtactgaaatatttattgatgtgcgcggacgcaaactgaaagctgtaatagtaaaggccccgttcagaaaataaatcgaaagccggaaaagagaacgctgataacaaatataacgcgaatattcagattttttgaatattcgcgtttttctttatatggctgatatacatttgttgttagttcctttccataaaaacagcttttgatgcaaaattaataataggatgaagaatatgataaatagataattcttaattttgcaatcaaaaatttattagctatgtctgaattggctccattgataagtgatttggctttgattctgatctgcgccggtgtcatgacgctcgtctttaaacggttaaagcaacctcttgttctcggctatatcgtagccggctttttggcaagtccccatgttcctcttactccgtcggtcattgatgtggccaatatccatacatggtcggagattggtgtgatatttttgttgttcgctctgggattggaatttagtttcaagaaattggtgaaagtaggagggacagcggtcattgcggcgtgtaccattatattttgtatgatattggttggaatttttgtggggtggtctttcgggtggcaacgcatggactgtctgtatttgggaggtatgttggccatgtcctctacgactattatttacaaagcttttgatgatttggggttgaggcagcaacggtttgccggtttggttcttagtattttgatattggaagatatattggctattgttttgatggttatgttgagtacaatggcagtgagtcagaatttcgagggtagtgaaatggtctatagcattgctaaattattattcttccttatattatggtttgtggtaggtatttatatcattcctacatttttgaagcgttcccgcaagtggatggcaaatgaaacattgctgattgtttcgctggcattgtgcttcggtatggtagttgtagcggccaaggttggattttcggctgcgtttggagcttttataatggggtctattttggcagaaacggtggaggccgaaaatatagagaagcttgtggcccctgtaaaagatttgtttggagccattttctttgtatctgtgggaatgatggtagaccctgccatgattgtagaatatatatggcccattgtgattattacattggccattctgcttgggcaggttatttttggtacaggtggcgtgattttgtcgggacagccgttgaaagttgccatgcaatgtggtttcagtctgacccagattggtgaatttgcattcattatcgcttcattgggggtaagtctgaaagtaaccagtgatttcttgtatcctattgtggtggctgtttcggtcattaccacatttctgaccccgtatatgatacgtttggcgatacctgcttatcatatagtagagaaacgtctgcccggcaaatggagaaaaatgcttgagcgttattcgtcgggatcgcaaacggtgaatcatgaaaacaattggaagaaattgttggttgccatagctaggattgtagctgtttattccgtattgtgtatagctatgattacactttcattccattttattattccattgttccgggctagtctgcctgtcttttgggcaaatctggcaggagctgtttttactatcgtttgcatcgcacctttcttgcgtgccattattatgaagaaaaaccactctgtagagtttcaggcgttatggcaggataatcgtttcaaccgggcacccttgatttctaccattttactccgtataatgatagctgtcatgtttgtgatgtttgtgatagagaaactttttcaggcttccacgactttgctgatcggtatagctgttgttttggtaggtatgatgatgttctcgcgatggctaaagaaacaatctatattcatggagcgtacttttattcaaaatttgcgtttcagagatgtgcatgctgaatttacaggccagaaacgtcctgagtatgaaggacatttgttgtcccgcgacttacatctttcggattttgagatacctgcggattccttatgggcgggacatacattaagagaattgaatttagggcataaatacggagtgcatgtggcatctatcattcgtggaatgcatcgtattaatattcctggggcgaatgtacgtctgtttcccggtgacaccatacaggtaatcggtacggatgagcagttgggcgagtttgcccgtcaagcagaaagagtatcagccgccgccgaagaggaagatttggaaaggcgtgaaatgagtctgaaacagttcattatagatcgtaactcatttttcttgggtaagaatatcagagaaagtggtatccgggatgagtacaaatgtctggtagtaggcgtcgaaaaagaagatagtacgctgatgacccctgatatcaatgtaccttttacggaaggagatgtggtatgggtggtaggcgaacgggatgatgtgtaccgtttgttgggtaagaaagaaaaagaggaagaataattaattttaataaataagaaaaccatgaaaagtgatcctaaagattgtctgtattgtcagaacaatgagacattgcacaatttaatgattgaaatagcgccactgagtgtttcacgtgtattcctttttaaggaacaaacctatcgcggacgttgccttgttgcttataaagatcatgtaaacgacttgtttgaactgagtgatgaagaacgtaacgcatttatggcagatgttacccgtgtgacccgtgccatggacaaggctttccatcctgaaaaaataaattacggagcgtatagtgacaaactttctcacttgcattttcatttggtccccaagtatgtggatggacctgattatggaggtgtatttcagatgaatccgggaaaagtttatctggctgatgcggaatatcaagaaatgattgaagctataaaaaaaaatctgtagtagcgattagtggttagtgattagtgcctgcggtgtatgcatccgctattaaccactaatcactaactattaactaatcactctttttcttcgaaatcaaattcaaagtcgaagtcatcgtcaccgaaatattcaggagtaatgaactcttccatactgcgacggtcctttttagtgggacgtcctgttccgcgggcgcgatcaacaaaaccgctgattttgctcatttccagcaattcatattgttccggagtcgttacattctccagtatttcaggaaccaatttggcacctatacgtttttctattgcctgtaaaactttaaatgagtacgtgacaggtggtttctttacctgtaccacttctcccggttttatcattctcgatggcttcacctgagtgccgttgatagaaacccgtcctttcttgcatgcttcggcagcgatagtgcgggtcttgaatatacgtgaggcccatagccatttatcaattcttgcttcagccattactttttattgtattggttcattgttatactgatgcctgccaggcaaaaactcttaattatgtcgcaagccgttgctacacgttcgtccatggtcttcaaatctttatcagtgaagtgacctaatacaaaatctatttgcccgccacggggaaaatcgttgccgataccaaagcgcagacgggcataatcttgtgtgcccagcgtagcagctatatgtttcaaaccattgtgtccggcatcgctgccttttcctttcagacgtaatgtaccgaaaggaagggcgaggtcgtccaccactaccaacacattttccaacggaatgttttctttttgcatccagtagcgcactgcatttccactcaagttcatgtaagtagacggtttcagcaggataagctggcgtcctttgagcgagagggtggcagtggctccgtaacgtccgtcagtaaaaacaagattggacgcctttgcaagggcgtccaatactgtgaatcctatgttgtgacgggtatttcggtattcttcacctatattacccagtcctgtaatcaaatatttcattgataaggattaaagggttactgattatttaccggcagttgcagcagcaccacgagcggcacgagttaatttaactgcgcaaacaacggcttctttagcgttaatcaattccaaaccttcatagcttaattcgcccactttgatagtcttgcccagacccaaagaagttacatcaacaaccaggcgttcaggaattacattgtataaagctttcactttcagtttacgcaactgtaatgccaatttaccaccggcacgtacaccttctgccaaaccttccaactgaacaggaacttccataacaataggtttggcttcatcaatctgatagaagtcaacgtgaaggattgcatccgttacaggatggaactggatatctttcaaaatagcgtttactattttaccatcaatgttcaagtctacaacatagatgtgcggtgtgtataccaagttacggagtccttcggtgggaacggagaagtgagtagctacgggcaagccgttttcgtctttctgcactccatacaatacacaaggaacaccattgttcttacgcaattcgtgagttgctttctttcctacgtctgttctgacagtacctttaatttcaattgatttcattgtttttaaattttttgtgttactctaaattaagttgatcttattgcttaattcgccatcacacgatgtggtatatcacacgatgagcttgaaaaagcggtgcaaaattactgcttatttccgacttgacaaaaagaaagcacaatttttttttatcattgtgctttctttatcagttggaatcagaaatcgatatctattttaatttcattcggactaagcggtttgtgcgcatcttcggttgtttcctgttcttcattttcagtgtgatgaggttcaataggaccttgctcttcggcaataaactgtatagcctgttgtaaaccgttcatgaacttctcaaaatcttctttatatagaaaaatcttatgtttttcgaagcttacttgcgagtcatcaccttctcccgaaacaattttcttgctttcagtaatagccaaaaacatttcatcttttcgatttttcttcacatctaaataataaatacgtttgccggctttaattgcttttgaaaaaacaatttctttgtcaccatccactacacttttctttttataatcttccataacttaagtatctttataaatcggcttcaaaattggacattttttttaaatgggcaaaaaatttgcggataaacttcgatgaaaaaagcgatttagatagctctatgtaaattttacattaaaaaatgtaattatgttatgtaaaatcaatgaaaatacctacttttgcaactccttaataattttatgtgaattatgataaatagagttcttattcgtcttaagatagttcagatagtctatgcttattatcagaacggaggcaaaaacttggatacagcggaaaaagagttatttttcagcctttctaaagcgtatgacttatacaactatctgctgcttttaatggtagaggtaactaaacaggctaacaaacgactgaatgctgcgaaaaacaaactggttcctactaaggaagaattgtttcccaacactaaatttgtagaaaaccgctttattgcacagttggaggtaaacaaacaactgctggagttttcgaacaatcagaagaaaacttgggagaatgaagctgatttcgtaaagactttatgtgataaaatcttagaaagcgatatatataaggaatatatggccagtgagacttcttcgtatgaggaagaccgtgaattgtggcgcaagctatataaaaatattatttttaataatattgaattggatcaggttttggaggaccaaagtttgtattggaatgatgataaggaaatagtggatacctttgtgttgaagaccatcaagcgtttcgatgagaagaatggtgcaaaacaggaattgttgccggaatttaaagatgaggaggatcaagacttcgcacgccgtttgttccgtcgtactatcttgaatgccgattattatcgtcatctgattagcgaaaatacaaagaactgggatttagaccgtgtggctttcatggatgtggtcattatgcagatcgctttggctgaaattctgagttttcccaatattccggtcagcgtatcactgaatgagtacgtagaaatagccaaactgtacagcaccccgaaaagcggtggctttattaacggaactttggacggaatcgttaattcattgaaaaaagagaataagctaacaaaaaattaatatctttgtttgttattgaagaataacagcattataaactaaaaaacatagaaagtatgaacttattatttgtatttctgcaggcagggggtggaggagattactctttcctgattatgatggtagccattttcgctattatgtatttcttcatgattcgtcctcagaataaaaaacagaaagagattgctaatttccgcaagaatctggaagtgggtcaagaagtgattactgcaggtggtatatacggaaagataaaagaaatagaagataatacagttgttttggaaattgcatcaggcgttaagattaaaattgatagaaattctatcttcgctaatgctgcatccaaccaacaacaggcaaagtaaatgacatgataacatgttcgacaaaaggaacatacgtatttactatttaaagactttagagagaatcagaagcttcctgcttagccgtaatagcagggagttcctgattttcttgttttttgtatttgtatctttctgcttttggttgcttcaggtgttaaatgatgactatgaaacggaattttccattccgttacggttgaagaatgtacctagtgatgtggtgttgacctccgaacttcctgatgaactgcgtattggcgtgaaagacagggggactgtattggctaactatatgctggggcagacattttatcccattgttgtggacttcaaggactatgaggataaagggagccgtgtccggattccggtttcagctttaatgaaaaagatttcggtccagttgaatcagacaaccaaattgctgaccatacggccggatactgtggagtttatttatacgaaagggaaggcaaagaaggtgcccgtgaagttacaaggcaaggtggctttagaccgccagtattatatctcggatatcatttactcgccggattcagtgatggtttatgctcctcaggagattttggataccatcacggctgcttatacacaggcattgaattttgaagatgtggcagataccattcgtcgtagggtgaatctggccgatgtacgcggagcgaaatttattccctcttttgatgatgtgactttattggtagatatctacgctgagaaaagtgtggaggtgcctatacgtggcatcaattttccgcccgacaaggtacttcgtacttttccttccaaggttcaggtgacttttcaggtaggtctgagtcatttcaagtccatcacttccgaggatttctttatcggggtgacttatgagtctttgttgaacaataagggtgagaagtgtccggtcaatctcaaatccatcccccgatatgtgaaccatgttcgtttgaatcccaaagaggtggattatttgatagaacaacgaattaaattcaatgattaagatagcggttaccggtggcatcggcagtggaaaatcatacatttcccatttgttggaaaatatgcatatccctgtgtataatgcggataatgaagcgaaacgtctcactgcttctgatgccggaattcgtggggaactgatcgctttgttaggtgaggatgtttataaggatggtctgttaaacaagccgttgttggcttcctatctgttttccgatccggcgcatgtgctccaaatcaattccattatccatccccgggtacggaaagattttaccgtatgggtggaacgtcaggaaaagtgtgagatagtgggtatggaatcagctattttgtatgaggccggttttcaggatacggtagatgcggtaataatggtctatgcacctgtagaactgcgtatacagcgtgccatgtatcgtgacggagccagcgaggaacaagtccgggcacgtattgctgcccagatggatgatgaagaaaagcgtcggcgggccgatttcacggtggtgaatgacggggtgcaattgctcataccccagttgaacagaatagtagaacaattaaaaaccgaaaaattcatactataaatttgggagtttcattggtgaattgtacttttgcttcctcaaaccataaatataaaatagaatagtatgttaaagaccattttatcaatcgcgggcaaaccgggattatataaattgatttctcaaggaaagaacatgttgattgtagaaacagttgacgcggctaagaaaagagttcctgcttatgctcatgacaaagttatctcattggcggatattgctatgtacacagatgcagaagaagtgcctttgagcgaagtgctggaagcggtaaagaagaaagagaatggagcggttgcttctatcaattataaaaaagcatcagccgatgagttgcatgcttattttgcagaagttttgccaaattatgatcgtgaccgtgttcataacggagatatcaagaaactgatttcatggtacaatattttggtaaacaatggtattactgaatttgtagaagctccggcagactctgctgacaaagtggaagaagctgctgctgaataattgaaataaagcgaaagggaaaggcctgtcaagtagattgtaaactgcttgacgggctttttgtttaccggcattattggtaaaaaaagtatgtgtacttcatcggcgaagtaagtggtgttacttcgctgatgaagtggacttactttgtctatgaacatatattacctttttcagtgggatacggtcgtttataatgccctgtagagaatatcctgaaaaatccttcataagcttcagcccctccgcaaacaccctgcccgtcggcgtttcggctgaagaattgaggttatggaatccttcagccaagtggaaatgtttcagccggttttattttcggaggagtggttgttctgaaggatattttccggctgaaacatttcgtgaggtatatccttcagccggaatgccgacgggcagggtgtttgcggaggggctgaaagatctgaaggaaaaataaggcgtttcggcatgtagataccgttatggaaaaaaacaacaggtcaaattttaaaaagctcttgttctttcaatgaaaacgtcttgttcttttttttaaagaccttgttcttttcagaaaagaacaggacgtttgaaaggttagtaacctgcatgtcggaaggttagtaacgtgtggggcgacacgttactaatgtgtgggttgtaaggtaagtaatatttagaaatgcaataaaaaacagaatgacgagaattaaacgtaaatcgtttataattaagcattttgcgagaattgcagaacggacagacctgcaaaagaaaacaaaaaatagcaacgcttcagttatcagactgttagccgtctatttcggaaacaacggcaggtaaccgaatttttaccgataggaacaaagaaatcgtggaagttgctcttggaaaggaaatggttgcgctctgccacttccttcagggtaagttcgggacagtaggtcatgtcttccatgatacgacagatccgttcgtgccggagccattcggtagcagagcagccgtagtatgtctcgaatctctcccggaaatgggaatagctcatgccgcacatgcgcgccatgttttcagccgtgaaggtatgccatttgtacattttcactttcagcatgaatacggccttttccagttccttcatccggctttccgcatactgcatctcaaattctttcagcggtgtggcaatatggcggagcgcgtcacgccgtgccctgaagaaatagtcgcatacccggtttgtcacgcagttcagataggagcgtcccctcatgcagcgaagcaggtcgcagaaaaacatcagttctgccgtccggtatcccgcctcatagacggcaacaaggtcgttgctcaggtagcaataggcaaaattttccggtgaacaggcaaccagagccatatagggcttgtagtcctgctgttccagtgtgggcagatacgggagttgccgcaatgcgtccactgtcagacgcattgcttccgtgtcacgtgcgaaactttccatttcgcggagcattctccgcacggaataccttttctctacgagttcttctgccttgtctgcgatgctgtgcagggtggcggcttggggatttgcttcggctgtccgccttaaaagatctgtcagtttcattgctgttgttttttgatgcaaagttcgcatatcctgcggttacggcagttccaaatcttgccgaaaactccaacagagtttcgtttttggtaaaaaaaggaacagcttcgtgaaaaaccttctcatttcaatggctataatacttcgtcattcaacaagctataatagatcaataaaaaatacattgcatctcctgcaatcagtgctgtaagccgttgcttgaatttcaaatcgtatttttcttccttcaaccgtcttaattcgggaaacagaccgctgaaatcaacgggtgtccggctgagtagatagaccggaagaaacaacagtatatccacaagttccttttcgcctctcaccagataaaacggggcaaacaaaagcatcggtatcagttcccaccatcggtaactgacattcctgttcttctcgttctgtttgtccatgcgggctttctccgcacgtgcggcagcatccagccttcgtatgaaggcttcctccttctcttccatgatgtcggctatcaccttgtcatctacaccgcgccggtatagttcctctttcgcctgcctgacttccttttccgaatattctccggtaacattgttggctatcatcagcagctcattggtgtcggattccttgattttcattgttctctaatttaatctgtttcattttttttcctcagtttcatacattgacttaggggacaaggctgaatatcaatatattgactttatttaatgagcagttattctattataagatgatggtggcgacattcggcgcactctcggagaaggtcgccgccctgaggcgcaaaagcgacacggggcgcatggaaagatggctcacgggcgaggaggtctgcgggcagttgagaataagcccgcgcacgttgcagacgcttcgtgacaggcggcttatcggctactcgcagataaaccgcaggttctattacaagccggaggaggtgaagcggctgataccgcttatcggtacgctctatccgcacggcagatgatttgatttattcacccactaatccgaagttatgatgaacgagaacaacgacgtttttacgatggaagacgagccgatagcctctgtggtgcaggatatgcacaaaggctctaaatggctgtccgcatttctggaaagttaccgtcctccgctggacggggaacgttacctgacggacggcgaggtggcggaactgctccgcgtgagccggcgcaccttgcaggaataccgcaacaaccgtgtgttgcccttcatacttttgggagggaaggtgctttacccggaaacggggctacgcgaggtactggaagcgaactaccgcaagccgctggagtaaggcggttgcatgaaaaagtaaacgggcgacaccttttgtgtggtgctgcccgtttactttctatatacttgggtgttttaatgaccttaaaaccagttttttgattgatccaaccaatttctatcgttagaaattcatatagttaataaaaagttgtaactttgcatttaacgcaatctaaaattaattgtaatggcaattttaaacaacattaaaaatgtactatcagaaaaaggagttatgaacaaatggttagcaaaacaattacataaagatcctgcaacagtatctaaatggtgtaataatcattctcaacctgatttgtacacatttgttcgtattgcaaatttgcttgatgttgatgttcatgaacttatttgtcatacaaaaaaatagtatctaaaggaatatagatgtttcaccatttttaagcatgtaaataaagtgtatgagcaataaaatttggaattttgatatattagttgatgattgttttgttaattttaatacaaaaaagcaagaaataaatccagatcataatgacaggttattatcagtcgctaatggctttgaagatggcagttggagatatcgtcaattcaaagaatttgttttcagtaatattgcagaaacagctttgtctgcacaagaacgagagaaattaatagataatgattacggtaggcttattgaggctgccaaacatttacgacttgttgacaaagagcagaatggaaagggaagtgaaatagcggaaattattctatatggcataatgaagaaccattataaagccttatctgcaatacctaaaattttttataaacagaatgataatgataatgcaaagggctctgattctgtacacattgtaattgacccaaatggaggctttcaactttggttaggagaagctaaattttataattctcttgaggatgcgcgattatacgaaccaataaattcagttaaacaaatgttgcgcaaacctattatgaaaaaggaatgcggaataatgaccaatctcaatgaacttgataaacaaattgaaaaccaaacattacttaaaaagataaaagaatgtttcgatgagaatacttctattgacgaaataaaacccaaactacatatacctattcttttattacatgaatgccagataacagcaagtactactgaaatgagtgatgagtataaaaatagtattatttcttttcatagagatcgtgctcattcgttttttaagaagcagatcaacaagcttagttctgttcataaatattcggaaataaactttcatttgattctttttcctgttcctgataaaacaaaaatagtaaactggtttatttcacaagcaaaaaatctcaaaaatgatgcagacgaatgatatatataatacatgtttagatataagtaatgttctaaatgctggtgatataagtaatgcaagatccaaagtaattacattacttcatgagattaatggtactaacaataatccatatatggaattagtcaaccatcttattcgtgaagtggggcttttaccgtatattgatacatatactgcatcttgggaagatcggtttgtatgtgaagtttttaaagttaatattggagaaagaaaaccttgtgtcttacatactgctcaatcacaggtattaaagaatttattagaagggaaaagcgttgcggtgagtgctcctacaagttttggtaaaagttttgttattgatgcatttattgcgattaaacaaccaattaatgttgtaatattagtacctacggttgctcttgcagatgaaacaagaagacgaatttgccgaaaattctctcatcaatataaaataattacaacaacagatgtagaacttgcggagaaaaacatattagtatttccgcaagaaagggcttttgcctatatagataaacttccttcaattgatattctaatcgttgatgagttttataaggcaagtacaaattttgatcttgaaagaagctccactttactcagttcaatggtagaactcggaaagaaagctaaacaaagatattatcttgccccaaatatccatgaaatagaagaaaatgtattcactgaagggatgacatttctgcgtatggattttaagaccgttgtaacgcatgcatggcggttataaaagcagaccaaagaatgaagataaacagagttttaagacacgtaaacttattgaattaataaatacaggtataggtaaagctttgatatataccggcacatataagggaattgaagaagtaacaacaattcttaacagaaatttatataataaagactctgaactgcttgctaatttttctgattggctggaatacaattatggagaaaagtatattcttaaagatttagtcaaacatggtattggtattcataatggtcagctacatcgttctcttagtcaaattcaaataaaactatttgaagaacagaatgggttagattatttggtatcgacctcgtctataattgaaggagtaaatactcaagcagagagtgtcgttttatggtcaaataagaacggggctcataagattgattattttacctttcgcaacatcattggacgcgcaggcagaatgtttcgttattttgtaggtcgtgtctatatgcttgaagagccaccaagtcaagaaaatactaaattgagattagagtttcctgatgatgtagtaaaaaaacttgatggaaatgatcccggtataaaattgaataatgaacaatatgtaaaaattcaacgatatcaagatgaaatgatagaacttcttggaatggatatttggcatagaattgaaagaataccacaaatcagaagttgcaaaccatcaatgttaaagataattgcggaaaaattgaaaaatgattccaattggccaacaaattgcgatgctttacaaaacaataatacatgggaatggagggatgctttaggagatatcatagaaattttggaatatcatcgaaaaggacatttacggtattatgcatgtgcatgtagtaatggatggaaaatgactataaaagagctatataacacagtaaaagattatggtattacatatgaggatatatttacatttgaaagatatgtatcctttaatctctcatctattattgcggtaattaatattatacgtcaagaactttatcctaattcctcaaatatcgccaattttgtatataaagcatcaaatgcctttttacctaaaattgtattccaacttgaagaatacggattaccgaggatgattagtaaaaagatacaaaatgcaggtcttataaatcttgaagacgattctaaagagattacaatcgttatacaggagtttaacacgataggaattgaataccttgaacaaaaaatacctaatctccattcatttgacaaatatatattaaaacattttatgaacggaatccgttgcataacgacaaattaaaagaattaaataatagccatattattacctctatattttttgagatatgatatggctatttagataagaatccatatagaaattctttcgtataattttcatttgatatcttcagcagtatgcggtttttccgttctgtatgaacatcacgtatgtctgccgcttctcttgtgagagaaccttccctaccagccacatgcggaacaggtaggtgttgtaggtgttcagccgaaaagcaatcggaatgatgatttcaggcgcgtacacatccgcgtacagcccgttttcaagctgcatgtagcggcacacctcgtagtcgttcagcacgtccgacttgcggacggctttgatggcggcgttcactgccgggacggtcgtatggaacagtccggctatttcggtggcggtcatccacacatcgttaccggttacgctgaccgccttgtcctctatgatgattatgtcacgtttcatggctcctcttttttagatggtgcaacctgcaaattcctcgacgttgtttaaccttgcggcaaggttctccatgtcctgattgagtttttctttggttatcttcgcgtaaatctgcgtcgtctttatgctcttgtgtccgagcatggagctgaccgtttcgatgggtacgccgttggagaggaaaaccgtcgtggctgccgtgtggcggctttgatgccacgtgatatgcttcgtgacgccgcatctcttagtcacggcacggataccggcaaggcacgtgttataatgcggaacggggaatatcctgccgtcaccgcacagcccacggtatttgccgattatgcggttggcaatgtcaagcaggcggatgttggacaccacgcccgttttctggcggttgatgtttatccactcgtgttcgtcgaaataggtgcggatattctcttccgtgaggttgcgcatatccgagaacgacagcccggtgaacgcacagaacaggtagaggtcacggtacaattcctgtttggcgtttttcagtttcccctccatcagcaggcgtatttcgtctttggtcaggaaactgcgtgtcgtttcctccttcttgatttcatactcgcgaaacgggtcgcgtgtcagctgtaatttgcaaattttcttgtgcctttttttagaaaagttaaatatgccacagaatacaccagtaactaaggtttcataagttcgtttctcgtttgaaaatcgtctgcctgttttctaaccggtagctactaccggtgaacttgatgacttcacatcgataaagcagcctgtcaagcagagcgctggcaaggatttcatcattcaatgtttctacccattctgtaggtgccttgttggttgtaatgatgatggatgtcttctcatgtagggtgtttatcaggttgaagaaggcagttgcttcctctcttttcacaggaaacagcatgatatcatctattgccagcagctgtgcgcgcagaatcttgttataagtcatcatggccggagttgagatgtctttaagtctgagacaatttacgatatcctccattgtcatcaggtatgccttgtaaccggccttgaccgcatcaaagacaagaccggctgccagaaatgtttttccagtccctgatggtcccatcaggatcaggttataagcttcacggagccataccagttcacgaagctccttcatctgccggcggtctatgccctcataaaaattgtagtcgtattcgtcaagatcatgttttcggggcagacgtgccgcaacaaggcgtctctcgtagtctttcctctctttcatctcaacttcggtgcctaataccagggacaggaattccgggtaggtcggtttttcttcctgtgcatgatgcagaatgctgtccatgcggtttgcaatgttgtaaagccgcagacgtttggcgtgtgctttcaatttttcactttgtatcattcaaaaaacttgttatattggtttatatctgttttttcaggatgacagtccgctgtttccggaatggatgtcggagcttggaaagtcatcccgttcatattgtccttactcctgtgaattgagccggatatttcctgcacggaaaggctgttgtatatgtttttttccagacaggtccgcagggctgcgatcactgtttctttgccgtattcggatataacatgaagcagcagtttcatattgtctctgtaataacgcggcttttccctttccagattccggagccacagaataacggtggggtcatcttccgtccgctttcggatccggacctgcaagtcattcacactccgtgtcttgtccttatgatgtcttttgtcacatacatttttcccttttccgggacacaactcatgcctgcatatgagtttaccgctctctttgtcgtacagctcgatatgtccgttattctcaagtagccatacaacggtgttccgatttttataggtgccggagggcacgctgtagtagttggtccggtaccgtaccgtattgtccttgcggacatgatactctttcggctcgtctttggggggcaccggttctccatagtatggcaacagatatttccgttcaatctcaaattcctcagccggaaccaggcgtgtggttccatgtatcttgccgtttcctgttttttccagccattgcaggacctcggtgttaaggacttccaggctgttaaatgtccgtccggcaagaaagttacgcttgacatatttgaccacattttccacttttcccttgctttccggatcagcaggacggcagaacacgggctggaaatgctgctcgttgacaaaggcacggaatgttcttgtcaatatgaggtcacccaggttttctctgaccagcaggactttgtcctggtcatagattatccttcttggcttccctccgaaatatgcgaaagccagttcatgggcatatacggccagggctgatgtgaaaggcgtacaggaaaaatacacgaacttctgcctggaacggctcatcaccatgacaaaaaaataaactttgacaaagtcgttcctgtatgtgggcatacggctttctccgaaatccatctgggcatattccccgtaaggggtatccggcattttctcataaacacgtttggaaagcccctccttgtccagattatacttacgacgtacagtttccacaaaattgtatacggttttcccgcagacaacaggaagatcaggatactgttccttcatccagtcatgaatctgggaggcggacaggaacctgtactgggaaagaacgtcacagacataactttcgtatttgtcaagtatgcggggatatcgcctgcgatgctgcaattttgcagtcaatgtgtcctcatccattttcaagtaccggcgcaccgtacttctatgcagaccaagctggaacgcaatctgacttttgttaaatccttttgaatatagttctcttattttgtaccacatgatgactctgttgtttgattggtatctgcatgcgtccttagttctgtccatatcatttatattattgaaacgcaaatatagacatttttaggaggcatgatggcatatttcctttttctaaaaggacatggggcaaagatacggattacaactccatacctgtccgtattaatattttaatgttgtaatattttaattttaaaatatcaaacaatttaaaaattaaaatattctgatattaaaatgtttttaaattgaaccgtcagcattcctttgaaaaaaagaatatccattgattttccacataagatcaagtgtgggttacagaattaggtgtctgatatttttgatgataatataacatgtatgggtaaataaatatcataaaacaacacctgcatgacttcatgtacaggtatttatgactaaagttttaatatttcaacattttgatattttaatgttttaatattaaaacactttaatgtattgacattaagtattggatggatatatatattgaatggatattaaaaaaaagtgacacggcaatttagaatgtatacctatcggattcgtggaaaaagaggacgattcaaaataatcctgccgcttctttttgttccttcttgacgctaccaggcatgtccggttctccgccatcattttcagattacctatatttttattcgttcatggacaggaatgttcatgcgcatttctatcggcaacccataagtattgactgtcaggtattgttcattttctttttttcgggaagattatgcacagatattgtacttttcttgattttcagaatcggtttaataaagtctgccgtattgtcttccggtttgtccaccggccacttgccgatagcttccgaaggaacctcttacaaaatggcaatgccagtgcctttccggatttctccgtgtctttcaagacctgaaatccggcgcacatccgtatctgccatatgaccttgcagtttgttcctgtatggacataatatatatccgtttttctgtcacatattttttatattcatttcattccgcatggtcttttctcttttctttggaaagggccctgcccgagaaattccattttttcatcgaaaaaataataaggaagagcaagcagggttcaggcaaagccatgaaccaaatcacgcagagccgtgattgtcaattgattatgatttttttgtagacaaatagtctactttttctgtagattttagcttttttatgttgataatcaagtaattgtattgtctatataaaatctacatatttttatatataactgattgtcagttctttacagtgtaggcgaaaaatctacagaaaataatatggaggcagtacaaaaaggttgtgctggtccgcccttacatttgcagaaagattcaagattatgcaaacaaaaattacaaaaaccattcgtgtatccatagatgtgaaacagcatctggacgaaatgaaaggaagcgtgtcggccagtgaattcattgagacaatgctgtcctactttgagcggaatggggtggatccccgaacatcaatcaacgggaagttcaagacactggaacttcagggaatcgaacggatcatcaaaatcatccgtgccatagaaaaagataagattgacaagctgcttcctgcatcggaagcgcacagtgatgatctgctgaaacaggcagacaaacaggtcacccaactgaaagcggaagtggaacgcttgaaaaaagcaagtgctcctgacgtggtaggtagaaacaaattgggacaggttgtcaggctgctggaaaacgctttcgaccagaagaacttcaagaaggcggaaaaaggaacagattattttgtcgcaccggtttatctggaaatgttgttatataaagtaaaggaaatatgctcataaaacaggtaatggcccgtcctgtaccggctcatccgaagtggaaatacagtttgaacagagaaagtatgatatttttttttcacaagaaaatattatatggcgccaatgtggtttatgcggaaggctggcaacaatcaaaaaaaagaatggcatattctaccatatttccagcaatcctttacagaatgaagtgtccatatagtccggcgaattatctgaaaggggattatgaagttcgggctgtcaccatgaaggaacagaggacgacaggcggtgagttgaaaaaaatgcagtatcatacatgaatctgtattcaagaaatttcaataggaaccttatgattattatcagaactaaatccaggtggaatgtttgtaaaggtacataaaccggtcaacacaccctgtgtatgcgacaacaaggataggtgccgggcactggtggaatatctgttgaaggaaagtcttgaagacaaaccttattatgacactttcttctcccatgaggaggattatgtaccaccggtgacggtcatgcaaaagattgacagcaaccataagaagctgatgaaaggagatgataaattctatatgctgtccatcaatccctcacaggatgaagcggctcatctgatccggaaggttacaggaaagcaggtgacggaatttgaacagctcaccgtggaggaacaggaaaaagtcattcatgagttgaagaattactcccggaactgtatggacctgtatgcggagaattttcgcagagagaagataaaatcaggaaaggatcttgtttattttgggagggtggaaacggaacgccactacaggaacagtgatgaggaagtgaaggagggacaggcaaagtcaggggacaggaaacccgggctacagcttcatgtacatatcatcgtgtcacggaacgatgtgacacaaacagtaagactttcaccattagcaagaagcaaaggttcatttaatgaactaaacggtaagaaagtcatggtgggcttcgaacacatggagtggaaatcccggtgtgcggaccggttcatcagtatgtatggttacaaggccacacacaagtattacgaggacggcagggaacacacctaccattatgttccgggaaagaacgaggcgatgagcatggccaaatccgccatcctgcagaaagaattcagaaacgagaggaagatgctggatgtgtcttaccggatgttccgtttcatggtgaatccgaaacaggctctcatagcggaagctaaaagactggtaaaggatgcgtttactggaaaaatctaaatcaatttatgaatatggatcatatgtttattatgaaactggcagccctgctttttggcggcggcattgccagctgtctgtttccgggaaaatcccggatgtcacatgtcctgttcctgctgttgatacttgcagaaacagctgtcgcacatgccaccatcccggacgggtggtggttcctgcttacgggtgtcgtttccgtacttcttcgtctttctttcaaaggagggacagaaagcggaaagggcggaaaagccctgctctcccttcacgccacggacgggacaattatcagatattattactggttctccaatttccttgtctatggaggagccggttccggcaagaccaaatccataggcaaaccgctgatggagcagtacatcaggtccggattcgccggtttcatctatgacttcaaggattttgactatacccggactgcatacaacctgatcaggaaacacggatacccccatgagttctattatgtaaatttcatggacatgaaccggacttaccgcttcaatccgctggacaggaggaatataaaggacaggacgatgctcatgcagctgatggaggacgtactgggcgcgttgatgccgcccacatccaaacaggacgaatggtatacgggcgcgcttggcatcctgaacggcgtggcgtacaggctttgggacgagttcccggaatgctgcacgctgccgcatatcgtcaacttcgtgatgaaggccgatacgggacagcttcaggaattcctgaagctgaacgatatcagcgccatgatggcgggggcgtacctcaaggcggaaggcagtgagaaaacacaggcctcctatgtgtccactctcagcaactatgtggcgaagctggccaccaatgagaacatatgctatgtgctgacagggaatgacttcgacttcaatctgattgatcctgaacatccgaaactttttgcaatcagcaacaactatgcaacggagtcggtgatatcccccgtcatcgccatggtaatgagtatcgcctcgcgctcgttctccatggagaacagggtcccctttgtatttatcctggacgagatgaccaccttcaaggtgcgtgacttcgagaagctgccttccgtcctgcgcgagtacggggcggcgttcctgctgctcacccagtccggagccaagctggagaaactgtacagcaaactggacaggtcgtccatcgaggcgaatttcggaaatatcttcctgggccgcacacaggatgtggaggcattgaaatattaccctctctttttcgggaaatacgagaaggagaagaagtccaccagttccggcagcagcggtggcggccgtaattccagcgtgaccatcagcacacagaaggaagagatatatgaatcgaaggacttcgcttcattggaaccgggggaatttatcggaatgggaaaccgttccaatatcaaaggacatttcaggaagaagttcaggttgttcgaactggaggaggaaccgctgccggtagtcgcgttcaggacggagaaggaaatatctgacaattataccagaatactgaaagatatcgagagggtgcttgggatggaagacgcagaagtggatgtaaattctttgttcgccgacaggtagaaaagatatttatttcagtataaggtcaaacaggaaatactgttgaaactctttgaacaacacaatgccgagttcgccaagaaagtgggatacaacagggcaaagggtacgttccagcgttacataaccgtttgcaagcacattcgggagctcttgtcacacacctacaagtgtgtgaaagagttacagctcacgttcatcaacgatttcgagtcttttctacggacggagaagaaatggcgacaataaagttcctgcgtgatactctgaactttggcgatgccgttattagaaaactacgcacgttcaaagatgtttccattaaaggtgaactgtattctcgtgagttgtttagcagacatttcaaaactgacggtgcggtttgctctcttaaacaggatacatctttttctgttacaatcaccatctatttgcaaaaattagcggatacaatctttattccgaaaagagccatcgtcataaaaaagaggatgtgtcagcattttgacacacctcctatgtgcatttgcattagttgtattagtgcagatcgcgtgaacgtaagtattcaataagcctggccggttcatcagtctgaatcatgcgtgctcctaatttgtcaatgaggtagccatagccagcatcaggatctgcctttgaaacaacatcgtcatggttgccgtttcgtcctttcagggagttataccataagagagatttgcgggctaccaacttcttggctttcagaggtaagggattgtcagacttttgatagcctacttcgaagacaacgggagccatttcatttacgaacgaggtgatgcgttgttcagcatcatcattgtccatacgtaccattggcataaagatgattgaatctaaatggacaccaagtctattgttgatttcctcgatagattgcaatcctttcaagatggcaatatctgtagtgcctgtttcttgcagcaaagccactacttgttcaaagaatctgtccgccttatcaagattcagcatgatgcgtcctttggacatcaacaatacttctttcagtgttggcaccttatgctgagttacgttgccattatgatctttcagaaagagtttttgaatatcagcgaatgtcgtctctgctatcagccctttaccattggtggtacgatccagcctttcgtcatgcatgaggatgagttgaccgtctttagtgcgttgtacatcgatttcaactacatcgccacccatttgaataatgctgttgatggcatccaaagaattctcagggaattgtttccaatctccacggtgagacacgacatgtacataatgctggtctctatccatcagctttttgcggatatatccggcggtgttgacactcttcccttggttacgaagataattgacaagctctttagggcgatcggtttggataaaagaagctcccatttcaataacctttccccaaatggaatcttgttggttctcttccacggctctgtcatcattcaaaccggcgcaaagagagggccaaagagtgttgatccacactttgcttccagatttttgaatgcggtcgagaacattctgaagtgcttggtctatttgggtaaaacacacttcaaatgctttgggttgcatgtttttgatgtattcttccaccatggtcatagcatcaggattggccatatcaatgataggcataaagaatagcttatccaataccgctttattctcagccaccaccttctgatagggaagtccggctttgatgagtacctgctgtgtagtaccggttttttcaaggactttttctaccaaatcgaaatagtcatatcccttatcgatgtttacccaaatcttgcccttggcaactatcatagcttcttctaaagtcgggatctgatgactagtagctacaccggctccattcctgagcctcatttgtttgatttcagccaaagtataatcttgggggagtcccttgccggttgtggttcggtcgagggttttatcatgaagcagaatcagctcgttatctttggtttttttgatatcgatttccaccatattcacacctaggtcaatacagttttggatggctcgaatagagttttctggtgtattacgccagtctccacgatgagagataacgctgaccttcccttcctcgtatagtgcttgagctcttgaagggaatacttgggccattaggcccaaggttaatgcaattagacataaattcttcatactgatgagtaatattaaatatagcctttgttctgcttgatgcttgaatcggtatcaatctgtgacagaggtacgggctgtactaggttattctcgttcaaacttacgccattatagccggtagtgttggcaaaatgggctttcatcacttcgatggcttttcctgtacgaatcaggtcaaaccaacgatgaccttcgcatactaactctttacgacgttcaagggcaatctcgtctaataaagcgttgctgtctgagatttccacttcgtcaatgccagctctagatttcacatcgttcaggcaggtgagtgcggcctcaatatcacctgtttgtgcatagcattctgcaagcatcagcagaacatcagcatatctcagtactactacattgctgccgctatcttttactacattcgaggtctgcttcaacttattagttgccacatgtacttcggtcaagcggaaataagctgtttttcgcttatcattgtctgcaaacagattgtacacttcccgagtgggcaagttatgacctttagcaccgctcacggaacctgaaggactgaacatcataaaagcattgcttccttctgagtttccattgagcccagactgatactgcacatcaaagataatctcgcggttaccttcattttctgtatcgaagatgtcgttaggatcatctaacagtgcgtattgaccgctgttcaccactttgagaagctctattttggcttcggaatagtttcccatcgtaagatagactttaccaagaagtccttcggccgctcctttggtagcatggccttgtaggctcgctgtaaggggaagcatctctgtagcctctttcaaatcggaaataatctgctgataaacctcacttttatttgtgcgtccttgaccaaaatagtcgttaacattttccgtttctttagtcaccaagggaacatcgccaaagatacggaccaaattgaaatacatcaaagctctgaggaatttgatctctcctttaactacacttcggttattttcagtcatatcaactccatccactcggttaaggatgatattacattgctgaatgcctatatagttatgtttccaggaatcagcgataatcgtgttggatgaagtcatattgaattcatcaagctgaccatagttacctccatcattagccggaacctcgtcccaagtattgtctgagggaagttcgccaagtacatggttggcaattccatattgaccgctatactgaagacaggcataggctgcattgacacctttgttgatttgctcttcgtttttataataattgttgagtacattgttggtttcagggctcagatccagcagactttctgagcaactggcagtcagtgcgcaaagggcagctgagagaaatatatatttatagttcattgttgtctatgaattaaaagttgatattaacacctacagagatggttctaggaacaggatatacatatttttcgttgccttgttccaatatattggaaccttcagcatcaatgttgaatcctttataaccggtcaacatgaataagttattgcctaacacatatacttgagccttattgatacctactttaccaagcagagcggaaggcaggttatatgccaacttcaagtttcgaagcaatgcataagacgcatccttgaaatagatgtttgaagcagcagtagctttacgggcattagagtagttacccatgttgggagtagccattgtaccctctggattgttcacaggatgataacggttgtcaaagtagtcttgagttaccatcatgaagccttcaccacattcaagtgactggagtgttccgctgttcttttttttgccaagttcactgtaaatatcaaaggtgagttcgaagtccttgtagcgaaaagtgttgttgaatccaatcacggctttagcggcaggcgatccaaaactcttcttatcgtcagcgttaatctcattgtcaccgttcaggtcagctatgatgtagtctccgatctgagtgccggccatataggggtatttttggaaatcggcatccgacttatagacaccgattacttcatagccatacaattcaccgatagaattaccgattttagtgatattgtttcctgagatgatctgagtttgtccaggtgccagtgccagcactttatctttgttgactgataaactgaggtttgagttccaatctacggcacccaggcggatatctttagctgttgcaagccttacttcgaatcctgtgttacgtacttcaccaatattctgcaaggatgttgtgtaaccactctgttgaggaacgggcacattcagcagaagatcttgtgtgttggcaatataaaaatcagcactcaggtcgagatacttcatcaatgtaacatcgaaaccaatattccaagtggaagtcatttcccaagaaagatccggattaggtgagtcaccaatgattgagccggatgcgatagaaccatctgttacatagtctgcgcttcccattagagccaaggcaccgtagttgggaatttggttattacccgatttaccccagctcaaacgcatttttgcatattccactgtttgattgttgctcaaaaagtcttcacctgagataagccatgctgcagatactgcagggaaaaatccccatttgctgtttgcaccgaatcgtgatgaaccatcccatcgaacagaggtgttcaacatatacttattgcggaagttgtagttgatacgcccaaagtaggatgtcatggcccaattgtattgtgagggagtcactttaaaactgctaccaccggcaatgttctcgatagagtcatcagtaaagcctgaagccactactttcaaaccttcatattcttctttttgataagattgtcctaacagtacctgaaagttatgagcattgttgagaaaggattggttgtacgacagagtattctcgatgatgtagttgagagattctgtagtattcctcgatgcttcagtgggtttgggagcaggtacgcgataagcaccgatggaagaagggttaaagtagttgtaatgagcagactcatagtcggtacccagattgattttatatttcaactggtccagcagtttaacctctgtgtagaagttaccaaataggcgagcgcgcttttgattattggtaatcatggtagcccaggccagcgggttttcgcagagtgcaccatctgcttctttgttggcgttaatctgagttgaaatagcgtagctgccatcttcattgtagggagagaagaaaggatagctgatagatgccaaaccaatcaatgaaccgccccaagtgccacttgaactgaatgaattcgtgcgagtgtatgaaggagacattgacaggcccattgttatataattggagggattgaagcgcagattgacattggctgagaatttgtccatatccgaaccaagaagaataccctcttgtttaaggtagccaccagagaatgaatatgatgctttctccgaacctccagctacagcaatattatagtcttgaatcggggctgtgcggaatatctcatcgtaccaatcagtattggtaaggccttgctcaccattcagatagggaacgatatagtcaggaatcagctcacgcttggaggcacccttttgctttctaacagtgttattatcgctttcgcttctattttgggggtccttgtttacataaccggtatttcttgcttcttttaagaactgggcgtagtcgtaggcatctaccaacttcactctgtctgagcgagtttgaacaccatagctggcagaaacagttactgacggtttgccgtttctgcctgattttgttgttatcatgatgataccgttagcacctcttgaaccatagatggcggttgaagcggcatctttcaggatttctatagactcgatagagttgggattgatgctgttaatggtagaaccctctgacaaggggaaaccatcaacaacaattaaagggttgctccctgcagtcaatgtaccgataccccgcactctgatttggggagcactaccaggggttcctgatgattggataacttgaataccagtagctttacccgccaaagaattggcaaagttagcagaagggtaattcataatgtcatctgcttttacagaagagatagaaccagtgttgctcttcactgtggtagtaccataaccaatcacgataacctcattcaattgttcagaaacttcgtccatttggatagaaagcgtattgccctgaggctttatttcttgtgtcttatagccgatatagctaattaccaacgttgcgttatcattggttaactggatactgaattttccatcgatgtccgtcaccacaccgtttgtagtacctttttctaacacagtagcaccaataatggtctcattctgagttcctgtaattgtgccgctgattttcttatgctgtgcacatacaataacgctggttagtaagtacacaagcaagaaactaatttttttcattttgttttttttaattttaatttatttgcttaagcgtgtgcaaatatcatgaattgccattgcgaaatagttaagatgatgttataaataggttacagagaaatattgagagtttgtattctttctgatttttccattcagattttcaatgaggtttatggtgtagattatttctctgattgtatattccggagcatgtccgttcacttgcgttgccgtttcagttacttttgttttcatccctttgattctaacagtaggttgcggaaatgagggtagagtatttccacatagacaaacaaaatgaattggttgagtattacaataagacgattgtacctttgcagaatgaattgaataaggaaaaagagaattttgataatagagtcaataatttggtatagagttgccgtttgaacagaacaataatgtggcaggggttgtctaacaacttaggaggtttctgccaaatctgttggcaagattaaagtagatagctccattttattatataccattataatgtggtacagataacagaaattatttctgcaaacatacgttttatcctataatcagagagagattctctttttaggaaagaaaaaaagatttcatatctacagttataaacaatatcaccatgtctaacaaccttgtatggctttagattgatattgtcagtaatcgcctttgtcggttggaattcaccatcgctattcactccttcgataagatcaacaccatattttaatgaagagttgttttctcgcctttgagatatataatccccgagccgaacccattttacacagttactttccatatcactcctcctctttttcgtgctgttccataaagaagcgtttctgctgctcaatctcccggcgcagttcttcctcggtaggcatgtatgtcatatacttggcggcaaaaatctgatcgctgtcatgcaatacagaatattttgctatggtgttgtccgtatccgtgcagagtaacacaccgatggtcggattgtcatcatctcctttgaccaaatcatcgtacatacggatgtacatatccaattgtccgatgtcctgatgagtcagcttatgggtttttagttcaaagatgacaaaccgcttcatcttgtagttataaaatacaaggtcgatgtaaaaatcagccgtatcggtcacaatatgctgttgcctttccacaaaagcgaatccacgtccgagttccataatgaacttttcgagattgtcgattaatgcctgttccagttccgattcggaatagctggtgtcccgacggaaacccataaattcggccaccattggattctttatatattccaacggatctgtttgaccggcataaggtactggcagagttgaactctctctttgagccgcaagccgtcgttcataatattgggtggagatattcctgtcaagatcatctacgctccacatatcttcagccgctgtcttaagataccattcccttgcttgcgtattgctgacggaaagaagcctgcggacatgtgaccaggtaagattttgcacacgcgtgtgcaaaatttctacatccttgaattccaaatagaactttcggtaatatgccaagttacgcttaccatagccggttccgtattcagcagcaagtctgacagcaagagccggaataagcttttgtccgtatgccgccctgcttgccccctgctgttcttcttccacgatacgccgtccaatgttccaataagtcataatggctatttgaccagttgcggcataagcttgtttccgtccttgttctatgatggttctgatgtcggaaacgaaattatcagttattatgtcagtctgttgcttattcttttccatatcccaaaattttgaaggcattcacgagttcggcttcattagcatcccatcttttcttaagctcgtcaaacttatggctcatttcggtgagggccgatttataatcaatttccgtatcgcggtcgataaactcgatatatctggagggtacaagcgaatatcctttctgttggatttcgtcacgatgagcggcatagtataactcaggctcggcatactcggcgaaattttcagtctgccaattgaaatagatttggcaaacccggctgatttctgtttctgtcaggcgaacatatttcttttcgtatatgttgctattccatgtgcgcaggtcaataaacagaatctcacccgttcggttacgcagttgtctgccatgccaggggccacctttcttgttgttgtttagaatccataacgtaacggatatatcggttgaatagaacatgttgcgcggcagaacgatgatagcctcgattttgtcgttttcaatcaaccgtttacgtatttcgagcgtgtcgctgtcgtccaatgccccattggctagcaggaatcctgcaattccgtgattgacatccagtttgttcaggatatggagaatccatgcgtagttggcattgctggccggcggaacgccataacctttccagcggggggccgtctcaaattctccatactcggcatatttcttcaaattgaatggcggatttgccatgatgtagtcgaatttgaggtctttatgctggtcgtcggagaaggtagataccgctttgtctcccaaatggtaggatataccgcgaatagccagattcatctttgccagacgataggtcgccggttcggattcctgcccatacacgttgaccgctttggtgttaccgccatgtgcttcaatgaacttggttgcctgcacgaacataccgcctgacccacagcaagggtcatagaccgtaccgtcgaacggctcaataagtgaggcgataagttctacgatagaatgcggcgtgtagaactcaccttcctccttgtcggcattgatcgagaaagcctgcaagaaatattcatatacacgtcctataaggtcgtgatcagtgaacttcttgggatctatcttgttaatctcgtccaccacgcttttcaaaacccccggttcaagggccgttttcgtgaaaatctgctgcggcagggcatttttgagtttaggctcattgtcgtccaacgtctttatggctgtatcgaaagcgatggccataccggtaggagccgtaagaataagcttgtcccagaacgtctcatctgtcaggaagaacacgccgtcctgcatatactgattgggacgggacagctgcatttcaacaaaagcctcgtcgtgaatgccttgaacctccacaatctcgtgcctgattttatccttttgctgcttgaaccgttcccctatgaatttcaagaacacaagagtcagcaataaatcgcgcttgtcggtcatggcagcacgtcctctcaaactgttgcggcagttgaaaagtatggtttctaaggtctcctcctttgttatttttgtttgtttcttggccatcgtatttactctattagtttggtgtttaacctaaaagcatttgcatcaatctccatttggaaaatcttaatgtcgggattcagctttcgggcaacacggattatttttgatttttcttcgacatccatattgattcccagataaacggattcgaaacactctcctccaatttcggggaatgctcttacttctttccaatcaattggacctttatcgtcattttgccctggcaataatgccatatatgcgggagaaggatttaaaataaacaatctgacctcttgttcatgttcccatgcctttgcttttgtagatatttgataatggaaaaagtcttttgcatccctgaaataatcgggcttctctacaatatctttatattgtacctccacttccgagcagccgatcatgacattgccatatatacgagaaagatactttctaactttctccatatccagaccgatgcaaatacctttatgcttgctgtaatagctccacatcaaaattgaatcatatatcttagaaagactacatatccatgcctcttctctggttctacgaaatggatctcttctcaattcttcaattatttccggagtccatcctccacatgcttctttcggaacatcggaaaaatcaattaacgagggatggcaatcaaacgggtcatttaattgcgtagcgttagtgaattgaagattgccataatgcagcatcatcaacccaccgttaaaatccaagtacttatatagttttgcttctcccataaatttattcattcagttctcagcaagtcatccacagacacatccagaacttttgctatttggatcagcatctcaacattgggctgcgttgtatttgtaacccatttagaaattatggcaggatccttatccaattgttccgagagccatttattgctcttgtttttctctgcgagaacgactttgattcgattcagtaatttgcgctccatattattatatatccattacatggttacaaagataagtatatttagagaatataattgaccaagaaggttaaatgttgcaattcgccacaaaaaagtgagcaaaacgtcaattacgactacgtatacttcttttatcgacatttttatgtgtcaacttctatttttcgtatcattgactctaatgacgatacttgtcgattactttttatgggaactttatggtatcaaatcacaaataatagaacgtatttgatttgataattaaaaaaatatagaatatcattcggttcaagtgtgtttctgctttccgggaaaatgattatttttagttaccaagcttcaaataattatgtattcgacggatttagaagaaacacagtggtaagttatcaagaaaatcttgaacctgcaagaaaggaaacgaaaatatgatttgcgtgaaatatggaatgttattttctatatagtgaaaacagattgtcagtggcgtatactcccttctagttttgctccttaggagttggttcactactactatcgcaaatggtcttctttaggcgaatttgatttgttattgaataacttatgagaaaaagtacgtgtaaaaatgggacaaaaagcagaagcaagcctgggtattatggacagtcaaagtgtactttggggtgataaccgttctcttaacggcattgacggcaacaagaaagtaaaaggagtcaaaagtcatgtagtggtagataaaaatggttttctagttgctgtcatggtgacgattgcttgtgtgcatgatagcaaggcggcttatctgctggtaagatgtcttagggaactctgttgtaatatcaaagtagtcttggcagatgccggatatcgtggagaagtaactgacaagattaaaagggcttttggatatattcttcaagcgtcttcaggcatggagccatatggccaaacgtaacataaaattgtagaaacgtgggaatccatttaatccatgcctgaaagaataaaaaaatagactaggatatcctgccttttttagaaacgatacccatatcccagcataattgatgcattgtcatctttggcaaacataaacttcgcttcagcattcagataactgcgttcggaaataggcaatgtgatacctcctcccaagttgaaggcgaatttggtagagttactccggtctatttccacttcttgtccgtttgtttccacactcttttttccatagaaattgttttgcataccgatgcctgcaagaggatagacagaaaatccctgtccgtcttctttaaagttgaatacataatggaaattcacatttacatccagaccggtaattttgtctttaggaaagtagaaagttacatccggagcaatccgaagattatttgctatcgcatagcgtccctgtactcccagaccgaatctttcataattggtctgataaccgacatttcccattaaggagccttctccttttactgtttgggcattcatgcccactgatgccagtgtaatcatggccagtaaaattaaatttttcataattaaagcatttagttaataaaatgtttttttttaaagaagggtcccccccccttgaagcaaacaacaaatgtttggctacatttgtttgctatatatagttacatacgtatggaatgtttgtactaatatgagtgctctttttttattttttcataaagtagaaaatgatgttaattccgtttttatatcctgaactatttttttaatgctttgtttctcagtatatgacatgggttagagttggttgtatgccgaattgccagtttatgaaaaatggggtatatggggttcggattgttgtaactgcctgaattcaaacagacaatgcaacagtgtcgaattcattgttagttaataatttatatttttcctttggggtcatgtaacccaatctttttctcggtcttgagtttaagatgttttgaacgcgcattacctgttcattggttatgtccctaaagtccgtacccttcgggaagtattgcctaatcaaaccattgctgttttcattggctcctctttcccacgagtggtatggttttgcaaagtaaacaaaaatatttagtttacgtgcaatttcttcgtgaaaactaaattcttttccattatctgccgttattgtatgtatttggtctctaaaaggttccaaggcatcgatggcagctttagttagcgggctggcatctttcccgctaagtagtcttatccatactagtccagttaccctgtcgtttatagttaatagtgctcctttgtgattcattccaatgactgtgtcaatttccaaatcaccaaaacgtactttcttgtctactatcgtaggacgcttgtctatgtccacgcggtttttgataaaaccacgtccattagtcaatgcacctctcttcttatgacttcttccccgtcttcttaaatgcttgtataacaacttatctccatgctttttatcttcccaaatatactggtagattgtctcatgagaaactgtttccaagccctttgttcgcataaacccagtcacttgttctggactgaaatctttctttatgagtatatctacttgaattttcaagtcgtccgtaaacttcacgaagtgctttcgtgaacgcattctggacatatacttagcctgagcgagatccggtttgtaaatgccattacgtttatcactattacgacgtaattcacgacttatagtgctacgatgaactcctacaagattggcaatctcggttcttgactttccgctttgcagataagcggaaatgttatacctttgttcttcggttagctgtttcatattgcaactgaatgttggggaactggaagatgcaaagaaacaacttttccacaggggaacaaaagggaaagaaatcttctttctctgttcctctgaaaaattattcttttcgtatcttctcattgtcatcattctcactcctgttgcattatccgcttgaacttaggctgattaaaaccgcattgttttgagatagtaaaatatcaggattgtttcattattagaatttatagccatgaaaagtttaagttttgatttgcgggccagactggtagtcagtcctgtcatcagggcaatagcttgtttattttcaaactcccccggacggataaagtgatgatatatcaatttctatatttacatgtaaattctaaaccgagtgtataacttaaaaaaatcagcctatgtattttctatggtacattattatcggaattcttgccggattcgttgctggcaaatttatgcggggcggcggctttggcctgtttactaatctgctggtaggtgttgtcggcggtgttttgggtggatgggtgttcggtctgctgggaatcgcaacgacaggtctgttgggcagtctgataacttcaattgtaggagctgtcgttttgttgtggattgtttcattgtttaataacaaaaagagaattgacctttaattattttaaccatttaaaaacaacttgattatggaaaatagaaattctagtttatggatcggtctgggagtaggttcggtcatcggtgctttggcttaccgtttttcacgtacttcaaaagccaagaaactgaaggaaaaagtatgtgacacctttcataagataaccggccaggcggaagacatgttggatgaagccaaagaaaaagcggtggatgctggaaagaccgtagcggataagatggccgacaaggcattcggccttgctgagaaaacagacgattttaagaacaaaatgcatgcaatggcttccgaagctaagaaataaatcggaacagataacttgctaataactcatacgcttatgaaatggaaggaacatttgaaacgtcaattgccgtccaatggcagatgggaaaattatgaacaactgtaccggatgtgcctgttggcatacgctgaaggctgtaacgaggagaaaaagaaagctctcgaggcatacaggcttcgttgtggcagattgtttggaaacaggtgcatgccgtctgccggcagcagggcggatcaaaaaaagatatgtgatgcagactgttcctacataaggaagtatgaatttgagttgtataaactgggcgggtgtatggaagactcacctgaataaacctgaattattgactttaaattgaaaagattatgttttatcatgtaaaagatttgcagttcaacgcccgggtttcacaacccgatccgcgttttgcacgtgtgatgcttgaagcattcggcggtgcgaatggagaattgaaatccgccttgcaatattttgtgcaggctttcagttgtcacaatccattccctgataaatatgatatgttgatggatattgccacagaagagttcggacatctggagattgtaggggccacgattcagatgcttttgggaccggtgaatggagaaatgaagaatgcgcttgaagatacgccgctccgcacgatgatgagcggtaagtctgctaaagaggacctgatccatcaggcattcaccaatccacaatttttggtaggagcccccggcagtccggctttgacagacagtaacggaaatccttggtgtgccacctatgtgtctgctacggcagaattgacggtggatcttcgttccaacatggcaggagaggcacgcgccaaaataggctatgaaaatcttctccagttgacggacgatcctttggtaaaggaaacgcttggttttctcatgactcgtgaagtgacacattaccagcagtttgaggctgctttggaaacaattcagcccaatttcccgcctggagtatttcaaacatctcccaaatacagcaatttatattttgatctgtcgaaaggcgatgacgctcgtggaccttggaatgaaggggagagcacgcagctaaaggaacagtggcaatatatagaacaaccacttgaagaagtgagaagcacggatggattgctggatcgaaaaccggaaggtaccgaccggtcggaaaaagagattgccagaaaagaagcacaattgtccaaggagcgtagcgggcaggtgctggcgtctactcccaagaaggagatgtcttggtgcaagtatcagtgatttgaaaagaacatcggtttaaatccgttgtaattattaaccataaaccattttaattatgaccaagaaaacagaaaagaaacaggaagaggcaaagagcacaaaaaagagtgcccatgcccaagaatgtaagtcttctgcctcatgcaagaaagcagagaagaagtaagaacttagaaccttgaaatttgtatggactgtccgggaatccggtttccggacagtcttttaatcattaaaacagtatgaatatgaaaaaaatattattaatagtttttgtattgacgtttgtggtgtccttcacgtcctgtcgtgacaaaagagaacaggaccgggcaaagtaccaggtggaaaaagtgaaaaaagacatcaatgatgccgcagacaaaatttccgataaggcagaagacagcgctgatgcagtaaaggatgcatggaaagatacaaagaaagatgtcaagcaaggggctgagaaggctcaaaaggaaataaagaaaggatataatgaaattaaaaaggaagcaagtaaaaaacttggctgatttttgtaatttattattttgccagtagtaaaccttacatgtgaataaattatggttggattcgtaatatggattgttggactggtgctgactatcagggccgctttggaaatatggcgcattcatgcaccggcagagaggaaactgatagccatcgtattggtggttttcaccagttgggtaggattgctgttttattatttttatggtaagccccgtatggcacagtggttgggaacaggtatcgaaaggtattgatggttgcataactgtttatattaattgtacagtgatatcccgatacaaagaaacgcaccggtcattgacagtgatcggtgcatttcttgcctttaccaatatttttcgattctttcgtagccgaaaataccgctgcgttcatctttcataccttgtagctgacggcagattatttgtgctccgatcatgctgaaagtaattccgtttcccccatatcccaaatcgaaaaacattcgttccttgtcaggccagttgccgatgaagggtagtccgtccttggtggtactaaatgtgccacaccataccatttccgtttcgaaagggaggtcggggaatagttttctgaccttcctttccaagatacgggttttctttctgagtaatgaatcccggcgctgcgggtcactgaacttttcgtcctcaccacctacgatgatccggtttttatcggttgtgcggatgtatagatacggatcggctgtttcccaaatcaggcaatgtgtcggccacaggtgttcggaagctaccggatgcgatacgagtgcataggtagaggtcagatccatgattttctgaggaaggaattgtccggcctcaaatcccgtggctatgattacatatccgcatttaattttatgtcctctgtctgttgtcatgatacagccgtcagatgtttctatacactcttttattgaggtatgggtaaaaactttcagtccgctttcctttatatggtaagctaacagtccggttgccgccctataagcatccatttgtgcggatgcctcatttatcagggcattgccgggtgtctttaccttatattcctctctaattttcttcttctcgagcagattgaccggcaacttatgtttttgccgtatttcatgttcttgttccaaaagtttgttatccgccgcactactggcataaaagaggctgggcagttgttcgaaaccggcattgactcccgtttcttccagtactctttttatatcagaaatggattgcaggcaggcatggtaagccgtcgcagcattttcctcgccgatgatttttgccatccgacaaagaggaacgtcaatttcatattgcagcagtgcggtgcttgctgcggaacttccggttgcaatgctgcgtttgtcaactatgcagcattttattccggcatggcacaattcgtgtgccatcaaggctcccgttatgccggaacctacaatgacgacatctgtcgacagatccttttccaaaggatggaaatagtcccatagggaatttctgatgatccaatagggtaatcctgagtgtaagtccataatattttgttattatcccctcacttcctgctgaaaaacgggaaaatgagggggatgaaaatagaaaagttatcttattagaatttattttccactcgtatttgaaggttatttaccttcttcgatggtacaaatgctgacgcggttccagtccggctccgagaacatgtcaccgattccctgtccttcagcagtgatgcgggtatcactgatcttgtatctttttacaaggatggtctttacggactcagcacgtgcgtttgccagtttcttattgaaagcgaggttgccttcgggagaagcatatcctttgatgataaccctggcttcaggatgctttttcatgtaagtggccacacgctccacattggggagttgggaggcatcaactaccgatttcccttgtctgaaggtaatgattgactcaggaatgcggttggtcttcaccacagtttctatgttggcagcctgagttctgcagtcagccaattctctttgcagattatttgcctgctgcatggcattgttcagctgcatgtccttgtcgttcaattgtgaccgcaggttgttcaccgcgtcattcagttctccgatttctaccgggtcatacggtttcatggttgtgaaatggtgcgtaccgttgctacacatgaaatgataggttaatccggcagtcagttcaaaagccgcattattggcgttgaaacgacttttttttcgattaaaatctccctgcatatcgtatacaactgccggtttgatgccgaacgtccatgctttctcttcacccaggttaaaattcagattcaggcccaggcgtgttgaccaggagtttgtatcgccggggccgttctgatagtaatgcagccatccgatacctgtcaaggcttcgatttcaaagatgcgcggttcgcctgtatagcttccgaaaaggttcatcagattgactttgccgaacacgctcacttcggaagcgtcaaatgcggtcttgctggccgtggtatttacataccccatgccttgaatgcccaaaccgaaaatgggagtaagttgttttccgatcccgactccgaaagccggacggacatttttgaagaacgcactgtgggtaagaggagtcacggcaccggttttcagttcaatagaccagttgtcacccggacgtgtgccttcaagagcggtacgatcattttgtgcatgcatggtaaagatacccatgcttaatgctaaagcaaagacagatcttttcataattaaaaataaattaatggtaatacaataaaatgtcacacacggtatattatcagttgtatagttatgattgtatacaagataataaattgctttgtcattgtactttgttagaaaacagtttgtaaaaaaggatagttcgaaaaatcggaggaaatttaatatctgtttagaagcatcaaaagcgtaaaaactccatgttagctataaaatgaggttttgtatattaaggtatatggctctttaatttatatataagtctttcaaatataactttatatattcatgcgctttttaacacaaatatttattgtaatgacaaatataaatcaaacaaattttcttttattgttgtttttttatgaggaatcaattatagtattaattaaaaacctgacaattatgaaaaaattaagttttgcagagctgaagggcagagtgtcctggggtagtgtgttgggaggtgtcatgaccgtattggcgatatccgtactgctgtccatattaaactcaagtatcggattatttatgcttaatccgttatccgaacatcccgcttcgggcataggtactgcggtagggattggttctgcagtcattctggttgccggcatgactgccggtggctttgtagctggaaagcttgctggtatggatgggataatacacggatttctagtttgggctaccacgttgattgttgctgtaatactaggtatttttttggcggtaggcacagcgaaaatgacagcgaatgcactgggagccgtttcatccgtcacaggtagtgtcttatccggagcgggcgatgctgttggaagtggagtttccgcattatctgaggaggcaaaggaattatttggcaagattgatttcaacacagtcctgaaagaaggggacatgccgcaaaatattcgtaccgcacttgccaaaagtgatgtgaaagaattgcatccggactatctgaaaaaacaattggaggaggtaaaagaggatctgagcaagtccataaagacaattgttgcttctcctcaagaagcggatgaaacagtgaatgactttttgaaacgtttgaaacaacgtacggaaaaacttaaccagaatatagatcggaatgatctggccaaagcgatagccaacaataccaatctgtctaagccggaagcagataaaatggttgagcagtatatgaatctgatagacaatgcacgtttggaagccgcaaaacagatagacaatttggaagctagtctacaaaaggcggcacaggaatggaaggagatcaaacataaggctttggtagctgccgataaggcaacggatgcagctgcgcggtctgccctgatttcattcttcgctatattgtttggtgctgtattgtgctgtgctgccggtgcttatggcagtagaaaaacacaggaaagggtagatatctgataattggaatgaattagacaaaatacccccgtaaccctattggaattggccctatgtgtcttgcgcatcatttccgccgggaagattagacctgaggaagaatagcatatttgagacacaggggcttcataccagtggcttgtcaaccgtcaattttctgactttttattaaatttgctcgggcttacattataatatttcttaaacacttcacggaagtattttgcatccgagaacccaaccatgtcagcaatttccgttaccgtatgttcgccctgtttcagcaactgtgcggcatgttgcagacgtatcatccggatataatcggccggagcataaccggtcagtgccttcaatttgttaaaaaaactggtacggctcatgtgatgccggctgctgagcaagtctacattgaagtccggacttcccatgttatcctctatgcattccttgacggaagctatgaatttccaatccagcgtaccggtgcaattaactggaagattttgttctttatcttcaatacaattataaaactggcggagcaaagcacgatttgtaagtatgtttttgaccgttgccttgagtatccccacactgaaaggtttggtaatataagcgtccgctccgattgccagtccttcaagcatatttttctcatctcccaatgcagtcaacaaaatgaccggaatatgggatgtttcaagatcgccttttatggtcgaacagagtttgtccccgcccagttcgggcatcattatgtcggatatgacaagaaccgggttgaattcccgtattatggcaagcgcctcttttccattcggacaggactgggtataataatccgttttgaacatgtcaataagataattgcgcaagtcatcattgtcctctactatcaggacacgttgtaaagacctctcttgagatatttccacggatggtaaccctgacgcgccaccaggcatgatagcctcaggacattcataaggtgtcctgggagagataaactttactttgtgcagatggctgttccctttcggaaaaacaaccagcacacatgttccttgatgttctgtgctttgaatctgaattctgcctttatgcagcctgaccagtttgtatactaacattagaccgattccgctacctgtcactttcaggttgatgacattactaccccgaaaacaattcctgaacaattttttctgttcacatgagggaatgccgattccggtatctttcacttcgatgctccaagagtttccttcctcgcgggcataaatgcggatacttccgccttcaggtgtatacttcaatgcatttgacaggacattcttcagtatggatcccatcttgtcactgtcaaaccacacattcagatagtcaaagttactttcgtaaataaaatcaacatgtttcagctcggcatatttgcggaaagtggcacaaatattatccatataggaattcagctcatattcagatatataaagggtggaggagtagacgtccacccgttcgaaatttatcaggttggtcgttagctgaagtaatgcattcacattcttaagggccgtgttcatatgcggcaatgcctgttcattcaccatacggttttctatggcttcctccagcggagcctttattaatgtgagcggagtacgtatatcatgggccgtattaatgaaaaaacgggtcttttcatccgaaaccttcttctgtttgtgcagtgtaatgatacggaatatgacagccataaccagcaccaacagaattgcatagccggccatagcccatacactggcccatgccggaggcgttatgacaatctgaatgttccgtgtctcataggtcttgtacttctcctcattggatatggcacgaatctgcaatgtgtaactgcccggaggcaggtttcttacaacaatccggttgtccaggctcgggcgactccattctttatgaaaaccgtcaatcttccatgaataaaggatgttggaaggatagtcataattaatggaaactacatcaagggaaaaagagttttgtctgtaggtcagttccagccggtcagtttcgtcaatgtccttttccagcggagaaccctcgtcgcccggataaacgggatgataggctatcatgaaatcgcgcagtaacagacgtgagtaatgcggctccggtatctgtatgtctatcgggaatctgacagccccgttattcccaccaaaaacaagtgtgtttttactgtaggttgtggcagagccgacattaaaattaacactcatcaacccttgttcccgtgtccagttgcggaaggtatgttttgagggagaataaatggttattccgttttccgtgcccatgaggagactcccgtcctgacgcggaagaattgtatacctcaaatccgcaactacgcgcctaatatgatacagaagcgaaaagaatctgcatcgttagtaaaaagggggcacagtgcatcgaatgtcaccataaagacatataaatgccccttaccccaccatgcgacttgaggcaatacgcaaaatcacgactataagttgtcggtgttatccaaagtcattctggaacacattggcataagcattgttgcatgaatagatattcagcacatacttccttgatgtcctgacccatttggctggcacagagatgaacttaaagacaaacgtcttgatgcggcttgttgctttgagtccgaacctcttcacgtcaagcctcgccatgatgaatttatagaagttgcgtatgagtgccataagcagaagaaacaccgtgttttctcccataaaggattttggaagcctgttccagccgaatccgttattcatatcatcgaagatgcgttccttccctccacggaggttatagaattcgacaatctctttctcggaagactcgtagtcatttgtaaggatgcagcggtaggtgtattctccttcccacaggtcgagttcgccgtctatccgcttctgtctttgaatcacaagacggtatgccttccctttccatttctcgatgagaatggaggccagctcaaactcaatgccgcccaattccactttcttccaacctctgagggcaaagatgtcattgtagagcgaactgcatcggttagcacggatatagaaggtcttgcagtgtttagcaatctcttccactatctcttcagaacacgagccgcaatcagctctgaaacggttgataataagcttgttttgttcaaacctttcaaagaacctcttcagcgtgtccttctggtggaaacggacatttgtgttgccgtcgctgttctcaatgccgacaatcaagttgccaataaccgccacgccagggcgataaccaaggaacttcttgtatgtaggcttcgcatcaaacttctcagcctctatgaactggtggtcgaagtcaacgtcatacccctcgccctctttcagctgccctgtggacaataggcaattgaggagcagtgtattcagcttgtctgccgtgttgaagtcgtaggtcttgccagtgtcggatgtgtaggaaatgttatcctgggtcagttcctttatggctctaagaatcgtgtcggcactgcatgtgcgaagtgtcggatgaagcgaaaggtggtacatcagatgagtggtgacatcctcgatgcatgagccgccacaaaaataaacgctcataagcgaacggatgatttcgctgtattgataaccatacagcctgcatctcataccgagggttgagtcgattacagatgagagtctggagtcaaattgctccattattgaaaatattcctccaaaaggagtgagtttctcggatttaattgctacctttgccatgtctgtcgggtttgatacatattttgatttgcaacactaagataggtgaaaaatctgacatggcaaattcctgagcaactttttgttgctcaggtacttaaaaagttatatttgtaatagtgttgcggaattaagggtatagatattgtcggaaatcaacgcacagttgtctgtacggtactggtggataaacttctttttgccgatgtcatatacaagcaatccggctccgcgagtaccgatatacaggacgttgccgtctctctggtacaaagagcatatatagggggactcaacaggcaggttaacatactgatagtctcccgatttcttgtcaagccggtagagccccattcttgtgccgatccacatctgtcggacatttttttccagaatggtagtgatggagcttactcccggatacagacgcacacttcctgtttcaagattgatacgcttcaaatgataatatccgccggaccagacatcaccgtccgaatctttcttgatgtcaaatatatattggtcgggacgcactcccgcaatagtggcaggggcaatatgaccaatcttaaatcctttccttttttctatcttgcaaatgcctgacataaaaccgccggcccatatcacaccgggagaaacctcacacagcgtcaaaaagatatggttctcattgtccggtaccgattcaaaggaactgaggaatgattgccattctttggtatcggtctgataaaggctgataccattgctggttgcaaaccaaaggtcaccgtcactgtcctccagtacatcatggacctgatcgttcaccagtgaaaggctgttgccgatggagtgtcttatcaaatcataacttccataacggttgtttcggatggtgatgccggtaggataattggcaagccagatgcgttcctcctcgtccacataaatatcattgatattgtttccgttcattccattataactattataatcagctgttatatagggctcgctcatacatgtgttcacatccagtttatatacacctctgccacccgtagctaccagaagttcatgatcgttcagggcgacaatccggtttatctctacattattgggtaattggcaagggatgatttttcctgtctttcccacgtcatatacaagtattccctccttatagtttcccacaaacagttgttttgaaacagcatggtaatagagttcatgtactgatgtgcggatactttccacagctttgtcagacattctgtttagcctccccttttctacctcagcatagaacaggccgtttactgtaccgataaagaaatggttgtcatccgtctgttctatggcggctatttcactattgatcggtgtcggcatatgtagagtatttccggtacggatgtcataccatgcgatgctgtctttatagcataaccaaatacggtcattcttgtccagataaccgtaattcagaaatgcctgtgacttgtttctgaccagctccggatgtacataagccagttcgaatttatcatgttgtgaatcatactggaaaacacggcctttctgaccgattacccacagcacgtccttgctgtccatataaagccagttcaaggcaatccgtgagtccagcttcatgctgtcatctgagaaattgtaatgcttgatgcgctttccgtcataacggtctatcccttcctgggttagaaaccacatatacccccttcggtctttttggatatgatatattttctgattgctcagaccgtcttccagtcctatgtatttataaatttggcacctgcctacagaactgccgaggagaaggacagtaaaaagaaaaattcgtttaatgctcaaataagctttcatattattttacatattcaaaaacgtttgcaaatttataaaatattagttaaaccccaacctggtaatccactttattttatcaaagaccgtttcatccatttgacaatcatggacttcaggctggtatttgccggatgtgtcacgatttgtaggaagaatagcgcttaagcaactaacagcagaatgtaaaaatagacgcggttaccaagttattacttcaatttttgtctttttttcaaacctcctatgtctaaggagattataaaagttttctagaataaaaaagattgataattccactgctcgcacaacagaaacatatgcgaatataaatgaagtgacaatttacaattccatatccaagacaaaattcagggaacaggaaaaggttgaacgaaggataaccagaagttttacagaaggaaacaaagagagcactgccggaaatctctgttcctgacaatgttagaaatatttgtaacaattataagtcaccaataattccggtataaccgattatctgaaccgctgtatggcgcatattgttgttgagattgtatcatatagtgataaacgtctgattgttcgtatagagcaaaaagacatggtgggcaacatccttcttaccaaaaaggagctgatggaacgtgcccgtgaaatgttcaaaggtgagattcctgatgactgaaaactgactatttccgctgtcaattttgacagaaaggacattgataatttaaccattaaaagtatcaagtccaaaatggaacgcttggggttgcgtagcaagcacctgagcaattacacaggtattgacaagtgaacgctgtccttcttgtttgccggcgataaggaattgactaaatggcacaaggttgcgttctactatttctttaaattctatgaggtagcccggttctaatatcgaaaaacttcatagaactaaacaaaagataagtaagttccattccttgaaagatgaacattttttcctgtccgacttaatctctatccaatatgaatgtgtcaaaactaaaatgacctctccgaaaagttacagattgtgactacaagacctaaaagagccgtatcaaactctgttgtgagaatgatacgactcttctttttgcctttaaggatggtcaagttttagtccaaaagctcatctgaattaagagaaagtatctataaataattgttaatcaataatttcaaaacaataagtcaaaaatatgcttgtaacctttaagagcacactctaaaggggaagagttaatatcttgttagggagaagccattatgtaaatggaaagtttatagcaagcaatttgtgtattatacttacaccgaaaaataatcccaaatatcccataaatgttcaattttacaacatatatttaaacgctataagaaaacggattgttaacgaacttgcagatggtacgtctaaacttactatttctgcggatgatttaatgaattattatgtagagtatttccacatagacaaacaaaatgagttggttgaatattacaataagacgattgtacctttgcagaatgaattgaataaggaaaaagagaattttgataatagagtcaataatttggtatagagttgccgtttgaacagaacaataatgtggcaggggttgtctaacaacttaggaggtttctgccaaatctgttggcaagattaaagtagatagctccattttattatataccattataatgtggtacagataacagaaattatttctgcaaacatacgttttatcctataatcagagagagattctctttttaggaaagaaaaaaagatttcatatctacaaaatgaggctgtcggttcgcagcctcatttcagaaaagaggagttccggcctcttataccttctcctgttttcccgcctctctctttttctccatatccttttcaaccagggttgtgatcaccctggatggggaggaattatggatgtacatgaacagtcccggattttctttcagggcgacaatcaccgccttctcgcagggttcctctatatatctgaccgtctcacaatcttgtgacaccgcacttatctgtagtttttcagatggtctggatatatacatgatattgtccgcacatgcgctgaccgccgcatacctgaccttttccgtcggggatccgatataaatgaaaagctccggatcggccgtgacagcccttatctgaaccttctcggtgggatgttcaatgaatatgatggagccgcagtcactctccacagcctgcatctggaggtttccggacgggttatccatatagatgatctgtccgctgtcactcttcagcacctcggactttaccttttccgtcggtttgttgatatacaggaacactcctgtatccttcctgaccgcttccagctgtaccttctcggatggcgcatcaagaagcatgatcagggaggcatcctttctgaccacctccagctgtaccttttcagacggcgcgccgatgaattgtatcatctccggattctgtctgacaacatacagctgggctgcctcggacggatgttccatgcccattatctccatcggatctttactcaccctccgcaaatctgctccggacagattgtcaatcaatcttttcaatatattttttctcatctttatacttctcttttcttctgtctttgaatcataatcatatttcctgagcggcagccgaatgaatctgtttggcgatctggaaggccttcagaccgtagcccgccggtcccttgacaatagcgaacaccgagtttcccgatgctccgggcaaagcggtcttgttacctttcaacatctcgctcatggcctttccggataccctgcctatgtcaaccccgtgggccctcatgtctttcaggatatccgtcgcgtcaaaactctccccgttggtacggagcaccgcacttccgttccttattgtcagttcacggcggccgcccttgaacctcatttctccggaggatggttgcgcttccgttgcttccgttttctccacgacaacagtcttttccggaacagcggaagtttccaggaccgcctctttcctgaacgcgccgactgccgcggaaatttttcttgtacggtaggcttccgccttttccgtcgcttcgtatctggcatcgtaggtgtccatatgcccggcatcccgcataagctctccatatctctcctctatttccccgagcctggtaaaaagattctttaccgcttctgaaatgtcttccttgaaatggatgcctgcggttcctccgggcatgacggaaccgagacatgacaggcatgcctgccgggacgggttctttatcctcaggatgtttgccggactgtcatgcaccgccatcagctggactttctccgtgggattcctgatatggcctatcagggaggaatttctgccaacggccagcatctgtgccttttccgtgggggttctcacgagtcttatcagggaggcgtccccgttaaggacggacagctgtactttttccgccggttcgctgataaaccttatcagttccggatcctgtccgaccgcatacagctgggccttccagtcgggtacgcttatctcccggatgagatgcgggtccttcctgacaacggagagctgcgtgtttgcggaagggctgccgatggcggtgatcagcccggaatccgccatcacagccagcagctgcgccctctcgcatggattttccagaagggtgatcatttccggattccgtctgacgaccagcagctgcatcttttccgtgggttcatggatatagcgtatcatttccggattttcggctatggcggccagacagaccttttctgtcggctcacggagctggagcagacagtccgccttttgtctgacagcggccagctgtacctcttccgtaggattgtccagaaccgaaaccagatccggattctgccggacggcggccagctgcatcttctctgacggattctcgaccgcggtgatcaattgcgggttttttcccagttctctgagctgggcacgtcttataaaaaaatctgttattctcatatatgtatgcccgtcatgccggtggctcagcgtttggttatcataattctctttgaactgatgaggaaatttttccgctgatgtccgctatgcgcacaccgtagccggagggctgttttcggatagagaacagcattttctgttttgcagggttcaggacggttccccggccccgtaacatgctttcccattggctgccggatatgttcctgacatctattccggctttttccagccccttcaatatgccggtcgcgtcatattggttcccgttggtacgtatgaccgcgccttcggatgtgatctctatctcacgacggccgcccttgaaaagaagagggggcgtcatgctcttgtccggcgcggctgctttctcataatggttgattgcgactttgctgcctgccttgattatactacggagatgcgtatccagatcgacgtgacggaacgaggctgtcatgaccggcgtgccgtctttttccgacaccgctttccttgcgcatacgccaagtacctcatggagtctttccgcatcctgattatatgccttgtattcatcccccacacggatgagggccattgcatccggatattgttctttcgagcggtcatacatatcgagaatgccggaagagaccgtttcattgtttccttcttcttttatgggaagtggggatatgtcctcttccctggcggatgtgtctgccagggtgtgctgtttttccacactttcctctatcatggcggatgccttgccggcctcccgtaacacactcatgacatagccgaggtcctccttcaaatttgacagccagcttttcagatactgtgcgttctcctttctcggagttacggctattcccagatccctgcctgtgacggcagctgtgaattcggcgatgatttcctcccgggcatatccgcacgttccgaacgggtgatgcaggccgcggtccagtcgtgaggaatgcccggtggagtgggccatttcgtgaagggcggtcatctggaatgattccatgtccttgaattgtcccggagtcggaagaacgatcctgtctttggacgggctgtaatatgccctgtcctgcaccttcagttctatgggacagagccatttctgttcctttatcattttatccagccaggggttcctatttccttttacgttgtccgctacggcaggaccggagaatctgaccctcatgccctcataccgctccggatatttttccttgaaatccgtctggtctatgttgaatacatagaaatgtttcatgaagggagtcaccttatattcctgcttctgaagttccgggaggcttttgtaatcatcgaagctgattttttctcccgtcgtcttatgcttcacggtgatatcgtaaaaagtcacgggaagggcgtgcgatccttttatgaccatcaggttctcatccttcagctgacggaaggtcatgaataccgggagggtgtatcccatcctgtccatctccatgtagagcataagacggttcatgctgttgtacggacgtcctgatatgttctgtggcaggccggtacggggggtgaaccagggcttctgccattcaccggcggacatctgcctgatcttgtcaatcatttatgtctgacatagaattatgttgggcattagtctaaacaattaataatcaatcgttctttgacattttgcacaacataattctatctttggaggaattagaggctatctaagaatgtaattaactccttatcctcagaccattttcgtgatggtgtatcggaaacggactgctcacattttttgagaacttctaatttcctttccatgctaatttcggcgtagatgtttgttgtatcaatcgagctatgtcccatccaatttctaaccatatcaatatccgctccagaattaagtagatgagtggcggttgtatggcgtataacgtgaggagatgggcgtttattagcaagagagggatgatttaagattacatcttgtgagtatttctttatcatttcataaatacagaatcggctcataggctgattgtatcggttaaggaaaaggtaatcgtcaggcaacttgttgtctataaattgtttgagtaaatcccagaaatcctcccataaaggacatattctctctttacgccccttgccatgtaatgtcaccattggcattccacgttttgaaggcatcgcaacatccttcactttaacaccaataacttcagacactcgggcgccagtattatacatgaataggataatgacatgatctcgacttcttatcccttgatatttgcatgttttcaatggtgcatcagccaaggcttcgatctcagatttgtccatataggttatcatgcgtttttccgttttctttgaagggataagagtgacatggtgacaccaatctatatgttcaggagatttccacgccagaaactttgcgaaagcctttattgcagctaaacgattgtttcttgaagatacggaaacttttctctcaatttccagataatcaagaaatttcgtaataacgtcagtcgtaatatccgagattttgagattgtctattgcaatacttattaatgtagagacatacgataccaacatacggaatgtatcacgataactcatctgagtgttacgactaaggtttcgagtgacaattaagtactctatgaggaatggtcttagccaatagccaagatattctgtttcagtaattcttctgttcttcattgttcgtgtttttataagcataaaacaatttgtttgcttcctgcaacaaagttggcgtctttgttagatagacggaagtgaaggacacgttaagatgtcccaaatagatagacaacttcggcagtaaatcctgtacgttctttcctgatttataccagttagtaaggacgtcgaccgcaaaagtatggcgaagatcatgtattctaggctgatgacgtcctctatcagggaaataaagacctgcattcttacgaatggtcgcaaatatctgatgtaaagatacaaaattaacaggtttccccttctgattaatgaaaacatatgcatcctctaccattggggacatttgagtacttcgccattgtaatatctcttgcatcaattttgatatttgttcgttgaaagtaaccaagcgagacttgtagaacttactacaatgtatatgcacgtacatattatccatatcaatatcctttatttttaaggataaggtctcacttattctgagtccaagcatatacgtgatcatcaagatatatcgtatacatattggctcattaacaaatgatctatatttgcgatatgtaagcgcacaatcaaacagtctcttcagttcgtcatccgtatatatgtaagcgggataatactctggagctttaggcagaaaaacgggaataggtatgttttgaatgagtcctctagaaaaagcccactcaaaaagttttttcagaatgcagtgctgagaatgccaatatctggtgatgacatttccttttctgtaaaggaaggcattacaatcgctttccgttattgaagttaattctgttgtttctccaatgaacttagcaaataatctcaaagagtaagttgtactctgatccttacgaccaatagacctacgaaacttgataaatgactcaacagtttcttttatactcatagaagctccccccagttaatatttgaaacatctctaagtgaattgagatccacttttgcatatattcttgtcgcttccatacttttgtgacccagtaaatcaccgacatcctttaaggtttgtccttcgtttatcaagaaagttgcatggctatggcgtaaacaatggggacctttgtgcctaacgtccatttcgctggatttcaaatacctatatacgacggaagctatggctgtacaagatataggacgtatcggggctggtgtacaaaagaacaagctatcgcttcctatgtcatttggccttccctgttttaggtaagcgataatagcttctcctacattatgtagaagtggtaacacttgtggtcgacaattcttcgcacgcttaatatagacttgttctttacgccaatcgatgtcgctaatcttcaagtttgccacctcactacaacgtaaaccgtacatagcaagtaacataaaaatagcatagtcgcgcgatgcggatttaccagtttgttctttgactgtttgtaacagtttttgaactttattccacggcaagaaagaagggagattttcttcactatatactttgggagtgattaacgccttatctaggtcggtaatacaccaccccttttcgactgcataacgaagatatacacgaatacaacacaggtactctttcagcgtgttacgttgaaccttgttaatcgtgtagtattcaatgtatttatctatatcttccaatgttaaagggtgttcctggttctccttttctattatcttgtaaaagtaggtgagtatatatctccttcccttaatataggcatgagaatatctcctgtatgccaagtgattaaggtattcatttatgcgtatatctgatattgaaggagatcctgattctggtagcatatgtagctctttaagccacatatttgcaaaatagatgaagaaactataattagacttggtgcctttcttcttgtgagaacctttgtcttccaggttttgccatttttttgctgcatttgagatttcctcattggtaacaatacggaagttctttaaatcaagatactctattagatgaagttgatactgtgcataaagctgaagtgtctgtcttttaaaaccttttgatttgcaatccatcaagaaagacattctctctttataaaagggagcggcaatcagtctgactctgtgccatttgcgctctgcgagataattgatgatgtcgtcttggtaacgagaatctaaaagacctacgtatagtaagaattcaacagccatctcaatgaatttgattcttgaggaagggcaatcatgacgtttccgagaatgataatgatcaggaatgggtgaagaccattgacgtgcagcttcaacgacatcatcaagtgacacaattctcttttcgccatcatgaagatcgaaatattggataaacttgagcgaatacccagcccaccccaatagtgttagccgggacaatccttccttacttttcatagttagaaagtattctcgctcctttaataatggtgcagccaaatgttttttaaggaatgacttgcggataatgatttgttctaacatgctcttataattatatgagtaatactatataatataaacgagcatccaaaattatgttgtacaaaattcgataagaactctaattatcaaataaatatgaaagaaactgacataaacaaatgggcaacattaatgattttatgttgacctcaacataaaatcatcagttccgcatatctttccagtaccttcccgttcatggcagcagttcctgataaagcctttcctcgtattccttcaaaaaacgcaccgcatccgctgctgtgggacaggtgataccattgccccgggcatagtccgaaaacggttccttcaattccgggttgagcatgacataaccaagcatgtccaattccccgttttccaccttgtgtatcaattccatttcttccattgtgtattttttataattgatgggacaaatgtaaaagcggaccagcacaacctttttgtgctgtatctatatttctacaaaaaaagagagctttccttttctttctttggcagtttaatgtattattcgtatatttgcagtgccaaataccattcaatgtgtttcattgtcgctgggcagcgattaattgctcacaaatagtcgggctttttttatgcctatatataaccattttcatgagtttatgaaaatgataaagatactaagctacggctgtctttcccgatttacaattctgctctggcagtgactgtgatggtgtttggcgacacgggaaatggcagccgttcttttttctgcctaaaatgccaaataccattacagttatgaaacaaacagtttctatttttgctcccgacataaatatcgcaagcaaatcttcagctattcaattatggctgaatcgtaaaaaccaattcttttcttctgtacttgaagagggcgtatccaaccgccaggtcctgctgcttggtcatgcctcttttgttttctctgcattaatatgcgcatctttcgtatcacaggttcctgctctgatttgtctgtcctggttcatggtggcattgcggctttgtgtgaaaggaggcctgggatgaagttcattatagagccttccgcggctcccggtatgatccgtcttcctttgaaaaaagaaatgaaagttccttcgttatgggagatcatggtatcaaaatattttagtgttaaaatatataaatatcaaagcattaaaacatcaaaatattggaaaagagaattattttccttaacttcgtaacacactaaaaaacaaatagatatggtgaaaattatagcagtccataatcagaagggtggagttggcaagactactaccactaccaatgtggggttcgaactggcacgaaaaggatacaaggtccttcttgctgatttggatccgcaagccactctgaccgcggctttgggggtgacagatccggaagaaacggttttctcggctttgcagggtgcggtggatggcaaggaaacgcggcttccatggatacggttgcaggagaatatatccctgtgcccgtcatgcaggaaaatggcggatgcggagtatcttctgcagaacgaatacgggagggaaaatttccttaaagaactggctgccagaacggatggagggtacgattttgtgcttcttgactgcccgccggctgtcggactgatcacggtcaacgcgcttgtggccgccaccgatctgattataccggtgcagccggaagtggcttctttatatggtctggtttccatcctggatacggttgctgtaatacagaggaagatcaataggggactgaacctgctcggcatgctggtgacacagtatgacagaaggactacattgcatgcggagatattggaagcgatgcggaaacagtacggggaaacggtcttttccacggtcatcagccgttccatcagggtggcagagtccatgagcagaaagacggatgtcgtatcttacagcaggaacagcagtggagcggcggactaccggtcccttacccgggagatcctgttcagattgaatatggttgacaacaaataaaagtaaataaagaatatgggaaaatttattggaattgacgagattctgcagggcggaacaccaaaccgtcccacacactccactccggaggaggggaagaaaggggaagcactggccagaacctcactggagtatccgttggaactgcaccgcaaggtgaagaaatacgctgttgacgctggaatgaaggagaagcaggtcatagcacaggctatacgggaattcttcgagagagtggagaaagaataaagaacataaaattgaagaaaatgaagacattcggatatttgttgatggcggtcatggcgtgcatgacatgttcctgccgggatgaggaaccactgccgaacccggttcctcccgtaatggagccggaaaatcccggaaacccggaagagccggatacgggaaaggtgtacatcggcatcgcccctatcatcgagaacatgcaggaacagagggccgtggtggagaactggaaggaggggcattgcctgggagtgacagctgcaggggatgtgaacatacccttcacttttgacggcaggcggtggaaagccggaaaacaggtggaggtgacggctgagcagaaagtgtccgcctattatccttataatgtacaatatacggacatgaccgccatacctgtggacatcacgacacaggaggattatatgtatggagaaggaggggtaagcgttgagaagccgagcgcggtccttgtgatgaagcatgctctctccctggtcaggatcctgataaaaaagaatgattatacaggtgacgggagggtggatgcggtcacttttggaggtgtaaggctgtctgcgtccatggatgtcacgtccggaaagctccttccgacaggacagcccggagaatataaggccggagggaactacacactggacgatgcctctccggtatatgtggaggcaatcctgatgcctgtgggtacggctgagggtatcactgtcaatgtacatgtggacgggagggattttacctatgccctgccgcctacccatgtgtggaatcccggcatgatctatgcttacactctgaatatgaaatccggttataactgtgaggtggacgtggaccatgtgccgatggatgaggagtattggagcactttcggaaagaccgaccggattgtcatgagggattgcgggacggacaggatttatatatggccgaattatacgttctatggctatgacacctataccggtgagggtaaggtctggggattctttttgcggtatagaaaccgtggaggtggggaagacttcgccggacaggcacggttcgtgctgatggatggggacaggattgtggaacagtaccagccgtttgatatcaaatgcggaaacggtgcatgggacggatactgcaagtattgttatgtgcaggccgtgccggggacataccggctggcagtgctgttcaaaaagaacggggagtcagcctggttcaagccttacggatacgatcagaattccaatgatggggaatggatgtatgaggtgagaccggccactgatatgccggcacttcggatgataacattagagaatcagaaatgcaatacgtttctggcatatcctgttcctgataatgactggttcaatatagtctatacgctttcaaacaaaagcaggaaagccatgaaagggactgtaaaggttgtatgggagagggagttcaaactggaatccaactcctacagaccgagtgataaaaaggagaacaagattgatgactatgaatggcgcgatgaactgggaagctgcactgttgacatagcggcaggagtacgtttttggaaagggatagtatcctgcaagttcccgattcagcgagcaaatccaagagatcctgttagcggtgttggttattgcactccgatagcccatttgtattatcgggaagaaggaagctgtgagtggaagcttttgcggtgtgacacagaatacctgttcaaccggaactatccgggttccgagtctgcaaaaatggatgaagcgtttaattacttaggcattataccccaaagttggtaaaagacgataacaggccccattcttcctaaagaaaaaagataagacatgatagtcaatgtaccgatttacaggagaaccgtatagaaagatttcaagatcttctttacgctccttgtaataaatttggctgttagtattgatgtttggaatagtgcggtttatgataatgacagccggtatgtgcaatgtgaacaagctggaatgcctttttctgaaggattccggcttgtttattacatggctgaaaaaacaagacaaataagagggatgtgtccatagtgttcctggaacacccggtatttgggtagaactccggtagaaaatgttttctccacccttttgaaggagaaaaagtatggacagacggtcttgcaatcgctccgttccggtgttttatcttgagttttgttatgttttttctattttctaccattgttctaccagtagggcggggaaagtaatgatatcacacttttatcaaggaattacatatagaatgcaggggtatattggtcagatttagtatctttgcaaaaaatggtactgatatggaggacaagttgatttcccgatatgatattttagtgaaccggtacaaggaacttgtatctgagaagctgagcaggaaagattttatagaatacaatgaaattctattctcggcgcatagctgtgctatagaggggaacagtttttcagtggacgagacccgcaccttgaaagaaaaagggctgggcatgatccccaaaggcaagaccttgctggaggcatttgaaatcctggatcatttccaggcttatgaatatcttctgaagaatttggacaggccgctgaccgaggaactcctgaaggaaacccaccggctgctgacggaacataccctctcttacaagacccaatacgatgaaataccgtccaacccgggagaatatacaacagtggacatgtgtgccggtgatacgatatttggggaccatgagcagctgataaagcaggtcccccgcctgttacaaagcacccagcaggtcctggactccgggaagatccatccgatgatcatcgcggcaagatttcatggattttatgaatatctgcatcccttccgggacggaaacggtcgtctgggacgtctgatgtccaattttatattgctcaaaaaagaacagccgctgctgataatccccggttcgcagagagaggaatatatcaccgccttaaaatatatcaaaaaagagcgtacagatgaatttctgatagattttttcttccggacatccataaaacggatggaacaggaaatagaggaaaaaaagaatctcacggagaattttatcagggggatggaatttgttagaaatgtaaaatcatccaatgatgacatttcagaaatctaatattacattctgacagtccgaacagtactttgcaggcgaacttttcaaaagccggtaaaacgttctatttctccatccggacaggaagaggcaaactggatgtctttgatgaacgtggtgaaaccacattgctgccatctgcttcagaaatagtattgaatctttcaccggatgatgaaaacttggaacgaggtggttacctgatatctccagagccggaatccggttggaaatatggagaggatgaatggtatgtgaatggcaacgggataccctccggacaatatggtcaatatttatttacgtacaatgattacagccgttatcctgatggaagcagattcgtatacgatttcaaagcggacaatcctataaaggtgactatacagactggcatgtggagtaacaattctttctccttgtatacgcacggtgatttcagaattggcttttctgctaccggtctgagttccggtcagcaaacccgtgagttctcatatggagaccgggtaacaatatatgcggatggtgcggattatgccgtgccgggagaaggtgaccgctggagatataactatctgagaggtttctttactaccggatggcaggctttggacgatcttggggaatactcccagacatcagccggttcatattcatttacagcgacaaaggatataactattaacattgtattcatgtccactatcagataaaatacaagggctgtcttaaaaaaatgacttgacagcctcttgttataatagcctttatcttgtcatacaaaataaaaaagaacttgtaacagaagttaatgtgcaacagattttggttttacgcacaaaataggcagaattcctgcctatttttataagtgtggaaacattctacatcagaccacactatatgaggattatttccattttttacataataaaaaaataacaattaactgataatcagaataaatattcttttggcatgggaattgccttatcattatcgtaaaacaataaccattaaaaatataagattatgaaaaaattttttgttgcagtagcattggtaatgggattaggaacaacagtggcatttgccgaaaatttgacttcaggtgttgaaacagtcatggcagtaaatgacttcacccctattgaagtgaaagaccttccggcagcggtaacggaagcaatcgccaaaaattttgcggaatcaaccgtcaaggaagcggcggtggaagcggcagaggatggcagcaagacctatcaggttgttctgacagacaaggagggagctgaaagtacggtgttcttcaatgagaaaggtgaaatactgaaataatatattttgcgtctttcttgataaagaactgaatttgccctcataagaagagaacagttcttatcaaaagatacagggtctttataaataatttcattcataaagattgtcgttttttactaatattgaaccgtttttacaggagcaactgtccgagatgaacagttgctctttttaatttttatgttgccgttcataactgccagtacattgtgaaaatctattttaagtatccaatagtttggcagagaaagatgaggtgtcaaaacactgacataacctcatctgtaatgcgaaattaaatcaaaaaatatacctatagtttccaattaccttatcaactttgccaacatttgaaataggttcattggagcaaacagtgacaccatccacaaccaaagtgaatgatttttctttgctggtcatgctctcagacacctcaccgttatatctgtcataactatccaatcgtgatgccggagatcccgatgtgactgcaaaggtataattttcctcccaagagtcgtaatttcctctatcatcttcccgttctgtgatttcaacaccataaacagtgtaagtcgctgaatgacctgaggtaacagaaacagatctggttaattgtcccattaaaacttcatctttgaaagagacatttataatcgtaacagattgtttaaagttcgcctgcaaagtactgttcgaactttgcaactgcacagtggtactggctgaggaggcattcataatttttgcatctcctttagtcacagtccatccggaaaatgtgtatccggattttgcaacagcggtgatggggatattggtttttactttgtatgttccccctccggtaacagttcctccggaggtcggattggcagtcagggtcaaagtacgtttcttttccttgaacttgcacttgaatttatgatccttgccattcagaaaaacttgatatgatacagaacttccactgcctgtataattgtacttttggggttcatctgacggtcccccgtagaaatagtctatctcatatccgtcagaggcttcagcacctaccgtgggtctttctttaccatcataaagtccctctccataagcggtaccaccgataaacgatacggtacgtgagtccgcatcctcttctccgtcaacctcgatagtcaccgcggtctttccggttgtgagctctttttcaatttcttcactgcatgagcagcctaagaagatggttgccagcagcacaatgtaatgtaaatgatttgttttcataaattgtattttgatagtttttaatatgcaaatgtaagtgggaagcagcacaacctttttgtgctgcccttcactaaattttaattttcagttggatatcaaaagatttcttgaaataatatgtatttcgttcattgtcatattcaatctctgcacccatggcccggagctctaagaagtaattaatgattgtattgcgatgtacgcccatttccttcgctatttttgcggcacttcctgtatgttcttttttcagcagacgggtcagtgtctgtaatctttccatgtagtccagtattctcataatcctcttctttttctgatgtatggcctgaccggccttccgtactttctcacctcataatgcagatggtttcccgtgctttttccgcttgatccgatgaatccgatcactttgccactcctgacctcttcaccttccggaacataacaggcggacaagtgcccgtacagggtcacaaaaccataggcatggcgtatcatcacacagtatccatatcctccctttcttcctgagtatatgacttttccatcagctgcggcatgcacggtcgatgcaagttccgccgcaatatccactcctgaatggaacctgcgctgtccggtaaccgggtcgctcctccatccgtaggcggaactgatacggtggaaccggtgtacagggggatgtaccggtatcctgtattccagatgatgcctctccacgatgtccatgatctccccgatgcgctcaagactggaacaccgggagagtgcgtcctccaatatggccctttccttatcaggtaccggacagaagaggcataggaacagaactagtttcgttatcatgtggtattctttatggttttcctacaatctccgggaacagtatctccgcattgatcagctgtttgttcttcaatttgtaatagaaatgtcttcccccgtttctctcctgtatctctatgatgagcaccttcttgtccggtatggtgaatttcggaagggcgaccgtaaagtcacatgaggaaagcgcagccacctcctccggacggttgaaagagaagaggggctgctgctccagctgctggacggcggtctttttccgttttttcgcatcctgtatataaaaacggatgaagtctatggtatagccgatctgggaacggttgtgcagcccgaagcggaacagcaggatatcattgtccacaaagatattggtcacgcagaatctcatgccggccacctcgtccctgatattggtcagcagcttcggcctccgtgatatctctttttcaagcagtgctttctgccgggtattccgctctcttccctccagtatggccacctgcttctttttggtgtcctgtttgtccacaatgaaggaaaatctctcacatccgggcgcataccgcaggtcaaacgtatagaacctgccgctttcggtgatggctgtaaggttggtctgcagggcaaacggcgacacggccctgagtgcgacaatattgttcacattctccgctttctccacctgtacggtggtgtttccgaaatccacatacacgattttttccggatagatcacatgggtcagtttctcgtcagaaaccggaagaaccgccgtttccggcatggtaccgccctccttgtagacagcctgcgctccctcgtcgaaggatatgcaataggtgtaatacctgctgtcctccgtaacaaccgacaggttggtctctcctttgaaatcccttaccgttgatttcagccggatgacggacggacatacctgtatgacttcccctatgatgttctcatcccccatgttcaggtatttcacgggagtggggaatatcatatggagcgtcttctcataaccgatcttcaggtttctgcactccagctcgtcaatacggggctgctgggctcttcctgataaaaaagcaaacaggagaagtatccctgtgatgtaaattctgttttgtctcatatcttgataaattatattttaatagtttgatgtttatctttgcatccggctttagaatttgattcgtgatgaatttcctgtccggcattcttaacgtttgctatttgattgtctgtccctttgacatttgtccggttcatcttccgattgccctcttcctgtttccttgaatattcacggtaacttttccaaaaccccaaaatgtggaaaacaatggtaagggtgagaagaaagcagaaaagcaagatggtcacagagccgtctttcgataggaattcttccatttcgtacagttcttttaattatcattcgttattgtcacttcccaggtccgtttataatagtttacaggcacttcactttttgagcgtcggatgttcttgtaggcacggctttaaacgtccggagcagctgccggtcttcaacagtgccggatcgaccaggtcgaaaatccagtgtgactggggtatgagcagttcaacccttacgggtgcatcatccggcttcaatccgggaagtcccggcagaccgttcatgtccggaataaggcagcggccgtcagccggttcatgaagatacagtccggtccgtccgtctttcaggacgagccatgccggaaagcatgcctccggttcatattccgactgttccacttccgtgtcgtctgttcccggataacggacacgcatcctgatccgtatcgaaatcccgtattcaggaagggaaagaaacctgtcagcatcatccggtgtgaggatttcatgcagtacggatacatcaggggacaacaaccttccacgggagtgtgtcctactgtccggatactgttcactgttcatatgcaaggaggcctttccgtccggcatgaatacacaccatacaaatactccctcctccatgaggtcacctgttattgtcctgctgtctttcatatctttattttaatgtttcaatatgccgtttccggtcagctttcccccggttcttttttctccatcagaaacacggcatagttggtcttgatggtgaccttcactttcttgatattcttgcttgcggcctgcttggtggcgttcaccacaccgttcacgcctccggcaataagctggctgcccatgtccaggcctccggttatctgcggatttgtcccgtccaccgccccggccgtggcatccttgttgatttccgcctttgcgttccccggtacatagataccttccattgcgtctgaagaatatacttcttttttaaacggaagtatgttcccggccacattgactgtcctgatctccacaatgaccctttcgccgtctatcttcctcacttccccgtacaccggcgagtccttcctcacccgacggccgtcatcggtgagacagtcctcacccagacgcatcttcagcgtggatccggccatcacgacctggtcggaatgcacgtacgcgcggatggcgttccgcctgctgctcttgtgcaaggcgaccgtgttgaatcttgtccttgcctcaggggcttcctttgtctcttccttcttctccaccttctttttctcctgtttcctttttttcttcttccgcagttcacgggtgatactgtccaggttctcttgtgtgggaaggatataggaggcggtatccgccttccgcccgtattcctcttccggcggcatctcactgttgatgatgagttgacgcatacgctctatgtccaccggattgtccccgccctgtccctccgcctgcttgcgcaggggggtacgctcgagctgggccttcacatccgtaatggtcacatccttgttgtccgtgctaagacggacggtgttctgattctcttcctttcctttcatcgcggagattgtccagatgacaagaaggacaagtaacccgaacacgctgacaatgattacttgagtcttcttcatgttcttctgttttattcaatttctttctttgtttccatccgaggtgtccaacagctcgtattcctgtgtatagttccggaagaagaagcctgtcacattctccggataggacggggtggtgcgtatggcgtcgccccggctgtatatccttatacgtttgaccccgccggcatcatggatggacaggatggaggtgaacagcacgttgtaaccgtcatcacgtatcccgaccctgtgcagcttctcaaacacgcacttgtagatgacacccctgtccgccgcgtcggcataggcgcggtcgttcaggtatttgttccagatggcgttcagctcggatttctccaccagaaacacggcctgcgcctggtttccggagatgctcatcctgtcgaaagagtttacataataggccaccgcgttgcagtgggccttcaacagggtctcgtataacttgtccgtttccatggacttcaattgcaggaactctccgccggtattcacgacaaggatcctgtccgtcactccgcggacggtcatgttcatgaagaacagcaccagggcgacgatggccgcacacaacaggctgaccgccttgacatagacggaggaccgcttcttggcctctcccagtgaggcgaagtccctcaccatattctttatatccattttcatattcttccgttgttttaaaaaaggttatggatcctgcctctcacaatcgccagcagggacagtttcaacgcaagggagaacaacacctgcaggacgacattccacgaggtgttcatgacatactcgcagacgatggcgtccgaaaacttgctggcaaggatgaaggccggtaccatcagataacagaccagcaggttcttgcaccacgtatggaaatacgtccgggtactctcgttgtagaaacaggctatcgccacaggggatataagttccagcaggagcaggaacatgtatctgccgactatgaacagggtctgcgcgtacatgtagaaaggggcggctatgacgccggccacatacgccagcagataatcgaacgaactgccgaccggattgagcaacacgccggcaacgtccattaccgacatgtcgctgaactgtttctcgaactgtgcgattatcggcttctggaacaggtcggccacatcatagacctttccgccgaatccggcctgcagatcgtccatcagtttgccgaacaccgtttccagggcttccagcagcacggggaacagtgcgacggcggctatgcagaatacatactgccacaccaggttcatgtaatccttcatggtgggcgtgccgtcctcgttggactgcacctcccggtataccgtatacagacggtggatgagcgtgacagccatgaatcccgtcactaccgcatagaaggcttccacggcgatgttcccccggatactttcataagcattgtggatatgctcgaccgatatttctgttattgatgccatattcctattccgttacaagccccaaattccgtctgatggtacgcgtatgtgacatgatctgtctgatggtgcccagtgaagcctcctggcgacggacttcctgaagacatccgtcgagctgctccatccgttcgctgtcgttcattttcaggtcactgctgagtatatccccggtcagggagatgatggcggcgttgttcgccaccacgtcctgcacggccgaagtgatgcccggcagctccttcatgtccatcttctccgcctcttccagcgtcctgaggcagttgctgttcaaccggttctgccggtctatcaggtccgtgaacatccgtgcgcgtctgacggtggcggacaccttctggacatagtccagggcggtctggagcctgttcacctgttccaccgtctgcttcaccgtactggccgtattggcggcattgatgattccctgtgccgtattgccggggtcggtgaccacccactgggctcccgccgtcacgcaatgcagcgacattcctgtaaaaaagaaaaaaattgaaagcaatctcatgatattcctcctttgttctgattcctattttgttacaagtcccaaattccgtctgattgtccgtgtacgggagatggtctgacggatggcggacagtcccgcctcctgctccctcagcttttccagacacttcctcagatgctttatccgtccgctgtcgttcattttcaggtcactgccgagtatgtccatggtcagggagatgatggcggcgttgttcgccaccacgtcctgcacggccgaagtgatgcccggcagccccttcatgtccatcttctccgcctcttccagcgtcctgaggcagttgctgttcaaccggttctgccggtctatcaggtccgtgaacatccgtgcgcgtctgacggtggcggacaccttctggacatagtccagggcggtctggagcctgttcaccgattccgtcacctgtttcaccgttgctgcggtatttcccgcggtcagtgtgctctgggcggtgttgagagggtcggtaatcgccgcctgtgcggcagccttcaaggtcattccgccgcacaggagcagaagcagaagcggcctgtatccctttaatcctttttccatacggtctcctttcatttcctgttctttgacgggtgtctctccatgtatctgcctatcgcttcctccatcggcatggtcctggaatagccgtcaatctcagcccatgtctccccgtcggtctggaaggcgaggaacttctcccggctcagttcgttgcgcaccaccaccgcatacctcccctggccgccggtgaagcggatgaagcactcggaatgcggacgctccccggaaaagtcgttgcggatggaccgcatcatgttgcactgggcggggtcgccccccatctcgaaccttttctccacggccctgtataccacatccgttgtgggaaggatgtacagcagctgggtattggtgatcatgcctttggtaaattcgtcatcgggaagctggtcgggactttggacgatggtcatcaccgcaccgttctccttgcgtatcttctggtagcagaaggcgactgcggaatgtatgctgatatcctcgcctctggacttcatctgcgccgtttcggcatactcgtcaaaaatgatcatcccccttctggtccggtcggaaaggatcttgtcatgaatcacgtcgaagatcagggccatgaccaggtcggagaggaacttgtcctgtttgatctgcgtcagctcgaacacgaccagccgcctgttcccgaaatcgggcactccttcggtcctgcatacattggcataccgttcaccgggaaggaactcgctgcatatgaggcggaaggaggacaggtcaaaataattggggtctacgtccttccgccggcaaatatcctcataatgctccgtcacgtggcggtagaaagagggaaaggaatggggtggcaggcaggtggcgtaataatcctggatgaattttgtgagggctacggactgctcctcctcgtccttcccgaacatgcggcgccagaaacgctgcacgatacccgatagcacctctatcttgttgttgtcaagggaacggccctccagatcgaagggattcaggcccagcggtgtctccccgtcatagtccacatgcagcgagatttcaggataaagcttgcagagctgtccgaaagagtacccgaactccaccaccaccacgatatagccctgctcgatgagctgctgcacgatattcagtgtcagcacggacttgccgccgccggtggatgccaccacgatgccgttgcgggccggtatgcgttttttcttcgcgtcccagatatcctttttcaaaggtatctgataaatacggtcattgaaatacaccccttcctcatccggggtgaatgtcgtgtagttgatgaacagacagagcgcgagggaaagcggggtcaggaacaggaaaccgctgtcaagccctttctcctgtccgggaaccgaagccaggtatatgttggccagatgctcgtaggacggtatatagaatttgaagtccgagacggtcaggtattcccgcagcttcttctcggcccggtccagcagttccgggctgtcatcccatatcatgacggaaaaattggcacggcagaggagctgcctctcctccatgatctccttctgcatgttctcgagctcgtccgccttcggctccagcatggccctgtcccatcccttgttggtgcggtagaccgccacacggcgggagaactcttcataaagtttatccgagccctcgaaatagaggatctggttgaccgcatggttgcagtgcaggtgcacgcccaggccttccagttccgccatgtacaggctgcatccggacacgggcagtgtggtgtcctccacatcgcttctgacggtgcggtcaggcagatagtcaccgtcacagacggtatagcaacgcgctttctcccggtcgacggtgatctctccggagaaatggatgtcacggtcgcagtcagcccgggggaagaagttgatgtaccggatgacatactccctcaggctggcggcggccatcctttccagacgggtgtccctgatactgtttatcacaccaatggcggagttcaccccctccagaaattcggtgagtttctcccggtcggacacatgcagcctctcccggtaggagaacgggttggcattgtacgaggctgccagggaggacaggccggacagggtgaatatcagaagacagtcatgttccagatactcacggccggagaaatgcctctgttccgccttgtcgatgaagctgtccccttccagctcatgaacgtactcccttttaaggaacacgtcctgcttgtgcacgaagctgccggagggcaggtgtttgaacgcctggtagagacgcgcgttgcgctcctccaggtcggtacggtgcaggctgtaacattccggattgtacatgcggaacgctacagacacgcagccgtttctggtaaggatgacaccgtattcgtcattgatgacatccagtatggaatatccttcgtttgccattttcttattgtttgtttattttttatccattcggttgttatttgtatctttgcacaggaatcaaacactattattgtctaacttgatctgtcttatgatatgttaaatgaattgggagatatctaccaaaaaatggaaaggggcatacggtatactattgtttcccttgccgcctgcactattattgtgtatccgtttttgtttatgtatatatcatctttcagtagctatacttttgtcgtacaactgatgttggctacgggaactgccggagcatatctcagtttaaccactcttgtttcctgtccggtacaaccacctccatatgctgtattcgttccgattcctgttctcgcttttggggagttgatttacctttatctgatcgaaagtaaaggaatacagatttctttggcctgttattggacaaggtttcttgtgctatattcaagtgttgcctactttagtattcttctcctgtttgcaaagatttgtttgggtaagattacattggggggcaaacactgttggcagctccttaaaaaaaaagttgaatcatgcagacgatgagtcgttcctttctttagagggatcattgatttttttttcggtatcattgccactcttgccatacttttttaagaactccatgttcccatgtatggcaattcttatcaaaacatgcagtgtcagcatccccatgataatgatgcatatataatcaattggcattccgattgtttgttccagccagtttctaacactttccatactgtcaatagtttatctgttttttcattaaagcatttctcacatcacggtttgtaaccgtcttctcccaatgcggcggcctgtacttcttccttgaggcattcttatagaacttccttgccaacaacagaccacatccgacaagcaatacgaatatgaaaagcatttcaccgcctgtcgtaccgtcctccagccagctcttgacgttcagcaggagcacggccacggcgaatccgccgtaaccgagcaacagatagaagtcgcgtaccagcagcccgtgtatcttgcacgggttctcgatccctttgcgcaccttgtactccatggcggtcagattgagaagctgacaccggctatcttgcccacgcagaagctgatgacggtcaccgcgataaggacatagccgaccatgtaggcgacgttcatccatccctgtttcttgttgccctcgctgttctcgtcattgatgagtctccagttctttcctatgcctacggcaagcgccatgaccatcacaccgaggaaaaccggcagtgcgatgtcgttcaggacggtgttgatgtcacttttgatggattgtgcccctgccggaagaaccgccgccagcaggacggataaagtataaattttctttttcattgcctttcttgttctttttcagttattgttccttcataattgcctccgggctgccagccggtgatggtgatgtcctctatctccaccccgtttccggcggttttcaaagtgtagacatattcctttccggatcggaatgccgccgccggcatgacgaagtcgtatggatgtccgccggccaccagcgccacgtgcatggccggactgtcaccgggatagagcagcaggcttcctgtcccggaggatattgtgcctttttccggttttatctccagtgagcccgtcagaagactgtacgaagcggagtagctgtaatccgccactctgaccgcggtgacggcggcgggcattctgaaagtcaccttcgaaagaagatgatacagggtgatggaggcggagggtgcgttcccggacaccatggtcctttccgaatacagatagtctgtctggctccttgcgtccaggcccatctttccgccgctgaaggacgggttgtaaggataatacgcatatatgcctttatccccgtccgacagggaaatctccgcgaatgtccatttcccggaccggttgaggactcggatgttgtccggatacaggtttcccgccgtatccgttacaaacatgccgaactcgctgacggacatttcctgcccgtcatcaccacgtgccgtgcaggagctgatggacatgacggcgtcctgctccggactgtcgttagggccggagcagccgctgagggctgcaaccggcattacaaacgtcagacaaataatgagatgattgaatggtttatccatatttatagtttttagtttatgtccaccgatacctttctgtcctggtatacagtgattgacagtttccttccgctttcgttctgggtcagcgtaatcgtgccgctacggtcggaagttgtcgggttttcactgacggttgccgagtttgtgccggcactgatccaggacacgttggcggaagccgaccagccgatattgctgcgggaggtttcgctgccgttggtgtatgtgatcttctgtgaggtgacactgtaggtgacggttcccccggtggagacgacgtcatcaccgctgatggctctgagcgtgaatatgtacccgtaggtgattacatcggcgggctttccatcctgatggattgtcacatggcctgattttcctccgtaacttgccgtataggtacaattgcgggatgaagtgctgccattggccgccactgtgacagtcgtgccgctccggctgaagcccgacgcgcttcctgaccatgaggcggatgagctcacatccacactccggtattctgtggtggtgcctgttgttatgccgttccacttcgtgtatttcggacggctttgtgatgctgtcgcactcaggcggcttgtgcctccggatgagccgataccggacgggctggcggacactgacaatgagcccgtggtccagttgccgtactccgttgtctgactgccggcggactgtctgaccgtacaggcggccgacctgccgtttgaagtggccgtgactgtgcaggacctttcagacgctgttgtgttgttgcctgctgtcagtgttgttccggacaggctgaatccgctgccggctgccgacaatgacggtgtggccctgtctgtttccgtaccgccggaaccgctgacaccgttccacgtccatgtgcgggtacgggttgccgccgcgctgatggaggatgtgcctccgcttgcggctatcgtggccggattggctgacactgtcacgttccaggcactccatgacgcatattgcctgtttcctgcagactgggtgatcgtacagctggctgatttaccggcatgggttgccgtatatgttatacttcgcgtgcttgttgaggtgttgttgccggcgctgactgtttttccggacaggctgaatccggctgcactgcccgagatgacaggtgtggcggtttccgtaccggtctttaccccattggtatatacgtcacgcgcagccgagcaggtcagcgttgacgttcctccggcggccgcgatagtggtcggactggcggatatgtttactttccaatctccgtaaccggttgttccggccggctgcttgactgtacaggtcgctgatttaccggcatgggttgccgtgactgtacaggatctttcagatgttgttgtgttgttgcctgctgtcagtgttgttccggacaggctgaatccgctgccggctgccgacaatgacggtgtggccctgtctgtttccgtacctcctgaaccgccgacaccgttccacgtccacgcacgggtacgggctgcatcggccgtgatgacggatgtacctcccgtgtttgcaaccgtttccggattggccgatacggttacactccagtcgctccaggatgcgtattgttttgcaccggcatcctgtgttatggtcaggctgttatccgatgttatgccgttgtaactgccttttacggtaatacttctggcatttgtcgtagtattgttgacagccaggacctgattcccggacaggctgaatcccgtcccggttccactgagggaaaccgttacattttcttttttatcaggatcccggtggtcgttataataagtgctgagaacggctgtgacagccttgtttcctccggcagcgggtatgtttcccgcagttgtgctgatttgcaaggtctgccgcgtggtagcggaggactgttgtaccggcaggatgtaagtccttccggattctgcctgggtaaacaggaccttgccgtttcggggagcggtattcaggttttccgccacctttattgttttgcccgccttgtccggggttatccagacgtctgtcgttgaaaccgtgtaatccaatggactctcagtgccgggcaatggcttcccgtttattgaataatatttgtttgaaaccgtttcgtagttatagatgccgccggaatagccgctgccgatggtttccggactgacggtaaaggtatactgcagctctttgcccatgaacggaattacggtagtatgccccgcaaggaattctttctttgccgtaagggtgtagtccttttttgtgccgtcggcaaataaaagggtaaggaatgtaccgtcggcatcccggtcctgcgccggaatgaccgcagtgaatgtgccgccgtcattatacatccgtatatccgaggtggctccaagggtattggcggtgccggttcccaggttgatattggctgtagccttggccctttggatggtcacgccggaaagtgcctctcccgcttccggcgtataagtgacctgcagccgggacagccggtgggagaaggcgagcgttatgaccttatcggttgttccgctcctgttggccgcatacatgaagtcggaaagcgtgatgccttcccgctggtccccctgtatgctgaaatcataatccaacggattgcccatgtcttctctgtaggggtaataggcataataatccgtttcatagccggcggctatttcgttggcgtccccgtccgccacgaactgcgagccgttccagacgaaccgcttgttgtccgcatagtttccggacgttttcaaggttgcaggcgctgatgacatgcgtactgccgcatagacgccgatggcatccccggtctcaaacgttgtctcggttgcccgtgctccccctgcgtcaatttcaaaggacacggtatcacggctgtggattgcggtgccttcctcattctcacagccctgcagggacaggagggttgttacggccagccaggggaaaaggctgtttaaaatattcttcattttcatcgttttgtctgattatgggggattggcagccccgatatggtttgtaacagggcgggaagaaaggcttcccgccccttaaagtcagattacaggtacaagctggatttcacctttcacatcgtctgtccagggttcgatggtcacaccgctgccatcggcaccgccgatgaccagaccgttattccccagtacgatgtcgtagatattacggtaagagcgttcccatttcgttccggccgggaaggtgaattgcagctgctttccgtcaatggtgaacacggcctgcatatccttgcccgctgtcgcatcaaccggaacgacaatggatgaaaaggatacggtcttgtctgtcagagtggcgccggcgctgaattccacattgcctgccgtcgtttttgtcagggaacctgttgaaatatccatagtggcacgggtatacaacggagtggcggaaccgacattcttcagtgtgattccggtaaggatgccttcctgtctgtatccttccgttttcttcatgcggaatacgacctgtgaaagggcatgtttcatcgtgatgttcacattacggttcaggatgctcgccttggtgtcgccctgtccgtacagatggtccgtctgggtggtgatgtccaccggaagggcggagggggtggtcagcgtggcatcatacggataataagcgaacaccgtcgcctcgttctcatccagcaggatctcttccgaagtccatccggcagctgaataggtgaaaggggtgttggtatagacggcattctggttgtacggagtgcccaaagtaccgttgcagacataaagacccagcttgtcaccggattcccaggcggtcttttccgcgcgggaaacagcgggagcaccgatgttggcgttgattttcaaggaggcacggacatccttgacggttccttcttcattctcggaacagctgcatgccaatacggcaagacacgctgcgaacaaaaacattttcttcattttgtaaaattttaaattgatgataaaaaaacagtattaataagtaattattccctggccccattccacattctgccagtcctcgatggaagcggatgcggtatgtagggacggggatacgcggacggtgatgtccacactgataccgtcagcggtgaagtccttgaacacatcactcaggtcaagatccgcatccacgggcatgtccccgtccagatgaagacggatgacattgcccaccccggtattgatgccgaacaccagcacttccttccggaagaaattctccttttcaggggagacggtgaaaggcagggtggcgaaaccgcttcccttttcccttgtacgtacataccggcttgtggtcacgccgtcaagttcggcggtgattccggtatattccaggattcccgtattcgtcaccgtgatgttgaagacaatccgctgcaccatcagtttgctctcgcagatgacgtgcagggtgtcgtcagtcatgaccgtaccggtcacggaagaggaatacgcatatccctgctccgccgtgatctttccctgttccgtcggaacacgcaggcggacggtggcggcggagcccgcatcctccaggatgttgacatccttgttgcaggcgagaaactcgtaactcccgatatgcaaggtcccatacgcatcaccgcttccattaaaaggaatggaaagattgtcatattccgccacgccgttaccggtcagcggaaaaaccatcaggttcatctccgcctgttccggtgtgcccatatcggaagggtgatggaacccgttacgggcgtgcaggtatcctttgtagatacaatcctcggtgaacaggccgtcacaagaggaaagtgacagcagggacaggaatatgccgggcagaattcttactattttattcatattgcgacaggtttaaattatacgttgttatcagccggttgatttccggatcaagacgaccgcgataggctttggaactgtccagttccagtgagcgcatgaaggaggacacggctttgccgtcgtctttcagacggctgtacaggatggacagcagatagcacacattggaactttccggcagggattccaatattccggcagcccgtgcatcatagcccagtgacatcaggcagatggccgtgttgtagtcgttatagtccgacagtatcaccagcgcgtccttgtactgcctgtcctccatcaggttgagaccgtgcatgtaggccgagtcaaggacggtggtgtatttgaattcctctatcatatcccggcggtgcaggtagaatgcgaagttcaccgcacgtgccagaggataatagttctccctgatatgcttgtaggcatccggaaaacgtttccggatcccggcctcccttgcgtccggatccttgacggaggacatgatatccagaacggctgacctgtcatccatttccgtatcctgttgtaccttgcggacaagaagctgccaatcctcgccaatccaccggggacggatcagggtgtcgatgccggtcctgtcatccgtccttccggacaggtactccttcaaggcaacggcacgctgcctggacaggatacggttcgcggccgcgctgccttccggggatgcggtggcggtcatgtcaatactgtccatcaccaactcaccggtataggtcagcttgttgatcgcttccaggactttgtctatttcggaacggttgttcccgtattcctcgtcaaacaggtatctgcctgccggataattgatataggcggtcgtattggccgtggccttgcggtatatcttctccttcctgtaccggggcgcatggtccaggaactgcaccatactgcttatataataggtaatggtatccgaggacggtaaattggcggaactgccattgacggcaagtatccttccgtctactgtcagatcaatacgtttcgtgttatcggtaacatccatctcctgccggtaataatagctgaaggtattgttcctgttcctgatgaccgtatccagacgggcggcctggtaagggaaacgaaccagctcctcatatttgcgtgacaccgcgtcacgtttgcgttcgttctccgcaatgcgcttgtaatcgaagtatctctccgctatacgcgccgaatcttccggcgtcaccctgcgtaccttcagaggggtgccttccgagaacatgcggtagcgggacggaatcagcgtggtgtccagatcacggcggagccagtaagcgggaagtacggacaggatggtgttgtggccggcgatggccatgcggttccgttccatcttcgcgttgaagtgctggtaacggcggttccatctctcagtccagtcaatccattcctcgcgggcgatatagtcatgcttccatgcctggtagaactcctcctccagctcggccatggcacggcggtagcctttcatgtcgaacatctctttcagataggcggaatccgggatgatgctgtttatgaaggcctggtactgcgcgtatccttttttctgccgcttgacgaagtcggcgccggataggaagatcctctccagttctatgcgtctgccacgcttgtaggccacaggggtcagctgtacctgccatttgtcatctatcagcctgcccggaacggtcacgacaaaatccagattcacttttccggcacgctcggggatgttcctgttacgcgcgacaatggtcacctcgtccagctgcaacacggtcatctcttcacccgtaacgctgtcacgttcggccatggtgacaatatgttccactcccgaactgtccttccaggtgattttttcgggaacggaatagcatgtcgtgtccggtgcaggccgcttgccggcctgtgagagaccgaccttgctgatgctcctttccatcttgtgggacagggaacaggataaggacagcagtggaagtaaaaggattacaggtatgtttctttttttcataggaccgtacatttagaaaagatatatcatgttcaacgccacacgtgaaggtatcagataccatccgtgttttctgcccaggaaggcgccgcattcccggcaacggtattcgttgtacctcgcccagaccgcggcgccgccgagttcccattctatgttccatgtttttgacagggggtaggccttgccgatggagaggccgatgccgtagccttctccctcataacgtttcttgttccatatcctgccgatcgaatagccgcttgccagggtgttcatcccgacaaaaaaattggagtaggactccacgaaccagtagcgcacgcccggcatgacagtcaggttgcggaactggcggttatccttaaagacgaagggattgtactggaccggtagatgaagcgaccatcggcggttcagcgtcatggacccctccaggttgatgttgcccgttgccagccctatcaggttggtacgtgcggaatagaactgggccggggatgccaggcagacgcccaacaatatccccagaaaaaagaatttctttctcatctgttttctccttcctgattggacggccgggaattcagcacggtgatgtcccatgccgtcagcgtgttgaagtaacggccgtccaattcacgggcggaaatgtcaaatttgacactgacctccataccctcctccatgggaaaacggtccatgttgtcattcatcacttgcaggcagatcctcttcggatactggtcttgcgtttctatcacaaactcacgggacttccacggagtgcccgatgtctttccgactccttccttgaccggaaagagggtaagtacttttccttttatctccatatttttttcgtttatgtgtttttaatcaagtgaacggggatgaaccgcaaccatccttttcacgatctgctaaaaccattcggcatccggatcgacctccacggaaagccggtccatgatccatgtgatcagtctgttgacaaagcccatgtttttatccttttaaaagtattatccttcaattgcctgctcagacttatatggcggccgtcatcaactccggtcatataagccttgtggttcgtctgatgcctgttcgccacaggctttcttctgacaagcctgaacctgcccatatagtcgcctatcagtttttggtgacagatcatgaggccggtttcctgcggcgtctgcccggacttctccagctgcatgcgtaaaccgggtatgcagccttccagataagaccggatatagtccttcttacctttggcggttctccagtaaccgcgtctgccttgcgcatacccggaatacttctcttcggacagacgtctgaaggttttacgcaggtagtcaaagagcgcaatgacagttgccgcattttcctctgtcccgattaccaccatatgggttgtgcccgcgtagagcagcatcttgcagtaattgtattcacataagaccctcatcaggtcccgtttccagatattgccggctgcatccttgtagctgattctgtcagattcgcaggctgtcagccggttttgtggattctcaccggcaagatcaagcagggagaggttgtattccataagcaggcggtgtaccgccgctgccgccgcatgagcttcaccttcagatccgatctgtgtggcggattctttgagccggataagcttgcggattctttccgttatcttttctgatacttctttcatattgtttgctgtattacatctcatttcctgcagtcattgctttttttttacaggcttgcaggaactcgttgaaatcgttatgccggggatacagccggacggactcattgaccagtaccgtatccttcccaagattcccctccagtttgtccagggcgtccatgcctgccttgtcgttgtccagaaaggcatgtaccagccggtgccgggaaaggaactctccggacctgccggccatggccgtggagttcaggatgcagaaattcattggcggcagtccgggatgttccctggcatactggagatagctgagaaaatccatgaatccctcgaaaacggcacaacggtcgcctccattgtcaagacaggtgacggcttttattccggcacatcccttgaatatcggattcctgagctccatgcctcccttgtcattggggaaagctacggcgaaacagcgcctgtccttccttccgctgaaatggtagtatgcttccttgcaatatgcctttgcaatgtccgcatcaattccacgccggcccatgtattccagaagcatcctgttggtcaggggattgatattgtcaacagtcagtctggggctggtgccggcatccccggcggaagtcggaacaaggagggggtcggacggggcggacaggtcgcttttttcaatccgccgcatggcggagtgaaaatcgcaccgttccagacgcatgaccaggtccgccacacctcccgagctgtcctcaccgaaatccttccatttgttcgtgtgcaggttcaccatgaagctgggggtctcctcatttctgaaaggggagctgtacatgagatagccgtggtaggacctgaccggttcatgaccgtatttttccagtatctcccgcaaggggatcgcattggcttcctgtgatttcataatctttcgtttttttaagttcctgccgcaccggcttcacagcgggacggcaggatggaatgttctttcacatactaactaatgtcaaaatattatgcggtccggacggacatcagtctgctcctgagaaaacatagcgggctcctgatgcgcccgttgctgcgctcgatttccttcagggcggcttccagcacacggggggagtctgcggacagatgcagaatctcatgctgctgtgccggagaaatgcctagacgctcaagggcggcacggaaaccgtcctgcttcttttctcctgaacattcagcgttgtacttgcggatatagttctctatcagcggagtgaggcagccgcccacactgtaacggtagtcaccgttacggatgctgtccttgacggcggctatggcgtactccagaggcatggccggataacgggctttcagaatgcacgcccagcggatctggtcatccttcaggttcaggtattccagatcggattttaaagtccggatggaattgtcctcctcatccgtcttttcctgaacggatgtaaaggagcttgaggatgatatgttttcttttctttcctttatattgtaagcttccggaatattcacggattcttccggaataaatccggttttttccggaagaattccctctttcaaaggaacgggcgcttctgaaggttccgtgaagggaacagaggtgactgccacagatccacagatcggaacggacgccgcttccacagggagctgtgcctgggaaaccgggaaggaggatttttcttcggaaagaagatttatttcttccggaatgactgtcttgcgcttggccgcgtgacacatggacacatatcggatctggatggagtgccctgtcagaatgccgtactgtttccagattccggcattgaacagccccgtttccgtacaatagttgatgatccggagaacctcctcttccctcatgttccagtattccgcacaatcgaacagctcgtcctgtgtgaaacggatataacagccttccacacggtagatctcattcaggacatactggtatatcgcataaccggcacagctgtgttcctttctcagcttgcggatcttgatgtcacggaaccggtccgtttcggccctgtagtactcaaagccttttctggcaattcttcccataattatacgttttaagaatttttttttcagtgtgaaacaaacaggattcgaacctgtatcaccagcctgcatacaatgcggtgacttgcctattagtccattgttccgttacgattctgataaatatctcattaaactatccttatctctaaaaagtctttttccccattgtggataattgtttctgggcacacttagtccatctgacagcttataaaccataagaaaactatcatcagtataggatatttcgataacctcaaatccgcaactacgcgcctaatatgatacagaagcgaaaagaatctgcatcgttagtaaaaagggggcacagtgcatcgaatgtcaccataaagacatataaatgccccttaccccaccatgcgacttgaggcaatacgcaaaatcacgactataagttgtcggtgttatccaaagtcattctggaacacattggcataagcattgttgcatgaatagatattcagcacatacttccttgatgtcctgacccatttggctggcacagagatgaacttaaagacaaacgtcttgatgcggcttgttgctttgagtccgaacctcttcacgtcaagcctcgccatgatgaatttatagaagttgcgtatgagtgccataagcagaagaaacaccgtgttttctcccataaaggattttggaagcctgttccagccgaatccgttattcatatcatcgaagatgcgttccttccctccacggaggttatagaattcgacaatctctttctcggaagactcgtagtcatttgtaaggatgcagcggtaggtgtattctccttcccacaggtcgagttcgccgtctatccgcttctgtctttgaatcacaagacggtatgccttccctttccatttctcgatgagaatggaggccagctcaaactcaatgccgcccaattccactttcttccaacctctgagggcaaagatgtcattgtagagcgaactgcatcggttagcacggatatagaaggtcttgcagtgtttagcaatctcttccactatctcttcagaacacgagccgcaatcagctctgaaacggttgataataagcttgttttgttcaaacctttcaaagaacctcttcagcgtgtccttctggtggaaacggacatttgtgttgccgtcgctgttctcaatgccgacaatcaagttgccaataaccgccacgccagggcgataaccaaggaacttcttgtatgtaggcttcgcatcaaacttctcagcctctatgaactggtggtcgaagtcaacgtcatacccctcgccctctttcagctgccctgtggacaataggcaattgaggagcagtgtattcagcttgtctgccgtgttgaagtcgtaggtcttgccagtgtcggatgtgtaggaaatgttatcctgggtcagttcctttatggctctaagaatcgtgtcggcactgcatgtgcgaagtgtcggatgaagcgaaaggtggtacatcagatgagtggtgacatcctcgatgcatgagccgccacaaaaataaacgctcataagcgaacggatgatttcgctgtattgataaccatacagcctgcatctcataccgagggttgagtcgattacagatgagagtctggagtcaaattgctccattattgaaaatattcctccaaaaggagtgagtttctcggatttaattgctacctttgccatgtctgtcgggtttgatacatattttgatttgcaacactaagataggtgaaaaatctgacatggcaaattcctgagcaactttttgttgctcaggtacttaaaaagttatatttgtaatagtgttgcggaattaagggataattattttgcttatacttgtatggataatgttatcaccgctcagatagcatacgctatctcctacgttaaattcagtatctatattcatacctatatcgttttaaatattaatctttttcgatgaaagtgttagtagtagttaacactccggctgaatcccgatttttaccatcacgcacaaaaaaactatcgcttaacagcctttcataatcgattttattcataagaataacactcgcattgccatctatatacagtttgcattgcatgaattgagttccttttacttcctcgattacgtctatttgcattgttctttttttactcatatctgttcctgttattagttattgagcaaaacttcttttttactctgtttatagtcatacccagttatttctgttaaaaatcaaaaatggctttttgcatctcttcatcatttttaggctcatgagtatatctctcatggcaataacagtagttgcttccgtaagcacatgtacaaaacatcttattcagctcctctccaacttcccatctggcattatcgttaggtattcttccctcctgtaaccattgccactgggttttcattttctctcggtatgcagcattttttattcttttctctttccgtttcttggctacatcccggtactccttccttttggcaaaaaggatggctttggcagtgtccttatcttcatggacctcactgtctttgaaatagacagctttggcagagtaaaagctgttagtccattgttttgtacctttggccccctcattggggataaaaccctttttagcccattgcagggccgttaatatttccatattgctccctttctattatatattatttaagttcgaagattctgttgatggtgtcagctaatttatcattgatgattttcgagttccaactgtcaaattcaagaataataccaacttgtctggaaccgccggagtctgtataagacctgcccattgtgatatttacaggcaggttctcctctttggctacctctataaaagcgtttgccagtttttttaacatttcacatcttatcaacatagtattttcggattagtgattatgaattgacagccatgaagaaaccggcattattatactgttgcctgatttctgcggatgtaagaatatgatacttggtatacaactcagcattgaacaagtcaacctgaatacaatactccacgattttctccacttcttccggagagagtgcccaatagtccgctactctgcaaagcatattcttacaccaatacaatgaatggtttcctgtacggaatatctcattttctatataatcataaaccgcatatccattacatccatatacagttttcagatcactaactttggtttcatgcaactgtgatgtccttttataacaaggcaggaatggaataatcttattgtctgaaataacggatttcataatgtcttttatttaaatttcggtaataaggatgcagttcagattcttattgaattctgaacaaaagattgttgctgcaaaaaattatactcttgcaggtatatcgtatcttttacgtattttttttacgtaattgaaaacagtcttttcacagacttttggaaaagagggattattctcctttagatattcatgaatctgggtggaagaataataaggacaggttatcagcaaatgcttaactgactcctcataaggatcgagacggcaggaataagaagggcgcggacgattgccatgttgaagaagctcatcaacatttaatcgggaaagccgcatgactctgccgggaggaagttgcagcttctttgctatttgagaacggctcaagccaagaagtcgaagttcggcaatgttatgccagtcgtggtagtcttctgtaatcttttttgcatccattttctacataaatatagttttcgtaaagtgaaatatttaatgttacgaaaaagtgatgcggcaaagttacgagttacagtcagccactcattgttgatggcgatgaacaccatcgtccgtagcgggcagacatacagccagatggtattggtacagcagtgcttgtccgtgcgcaggaacatctcgaagtcggagatgaaagccggggtaagctctttcagggcgatgtccttcacatggtagcgaatgctaaggaactcttgcaggtgcttgtaaacggtgcggtacttcaacagcgtgcctttggctttcatgcctgcctccacctgtttctcgtagtcctcgttatgctggcggaacacctgcatcagcgtgtggtagcggtgttctagtccaagaaaagcgtttttcaccttttcagcagtgacgaagttgtcacgctccatgatttcctgatagtgcctgttgatgcgtacccgcatcttgtcaagcatacggttcgtttcgagtgccgccgcgcttctgcccgtgacacgcccccctttggtgtcccacaatttcggatcgacagttagcttgcagctgaactgcgtctggctgccgtccaccgtaatgcgtcccatgacgggaactgtcccgtcttttttcactacctgacgcttgaggtagtagattactgaaaatgtactcttcatcgtccttaatttttttggtttcaaaattagttggtgaagagtccggtgtcggtacgcaaaacagggaggaacggagcaatctttttccgtaaccaaatttttcgcgtgagttgtcggtagctcactatactttagtatcttgtttcgccatccgtacccgtttgtcgcattatcgggcatggttacgaacaagtaacgttgcggcgtcaggatttggtttcggcagggattgtaatggcttcacgaattttcgccacttcaactaaaacccttgtaactcaattctatcactatatctttccgcatttcacttttttgtagtaactttgttaaggaaatattcaaaatattgcagatagagggctatagttaacgaaaaaaggggtgcatgatgaacaccccttttgctcagtaaagataaggccttatctttactggttgtttgtaacattctagttgcggaattttaatccgtcacccgctgtttctacgataatcggtttgcttcggtccacttcctgtgacaatagctttttggacaaatcattcagcaaatagcgttggatggcacgtttcacgggacgggcgccgaattcgggatcatagcctgtgctggcaatgaaacggacggcctcatcggtcatttccaaagtaatgccgttgccggccagcatattcttgataccgttgatttgtaacatcacaatctgttctatctcttctctgttcaaaggcaagaacatgattgtttcatctatacggttcagaaactccggccgtatcgtttttttcaacatggacataacctctttcttcgtctcttcaatcaccacttcgcgattctcgtcattaatcttttcgaactggctttgaatgtatgcgctgcccagattggaagtcatgatgataattgtattcttgaagtttaccgtacgtcccttgttgtcagtcagacgtccgtcatccaaaacttgcagcagaatattgaacacatcgggatgtgctttttctatttcatcaaacaataccacagagtatggtttgcgtcggacggcttctgtcagctgaccgccttcatcgtaacctacgtatccgggaggcgctccgatcagacgggatacagagtgtttctcctgatattcgctcatgtcgatacgcgtcatcagactctcgtcatcaaacaggtagtcggccaatgctttggcaagttctgtcttacctacaccggtagtacccaggaagatgaatgaacctatcggacgtttcgggtcctgtaatccggcacggctacggcgtacggcatcggatacggctgctatggcttcatcctgacctaccacacgcaaatgtaattcttgctccagatgaagcaatttgtcacgttcgctttgcagcatcttgttgaccggtatccctgtccaccgtgaaacaacatcggcaatgtcctcagcggtaacttcttcctttatcatggcactgtcaccctgcttgtgtttcaggtcttcttgaatatccttgatctcgttctctaaagcctgtaattttccataacggatttcggctactttaccgtaatctccctcacgttccgctttctcggcttcgaatttcaattgttctatttcctgcttgttttgctgaatcttgttgaccagttccttttcactctgccatttggctttgtaagaggtttcctgttctttcagttcggcaatctctttattcagttgttgtaatttcagctcgtctttttcacgtttgatggcctcacgttcaatttccagttgtttcaggtgacgtgagatttcatccagttcttcaggcacggaatcacgttccatacgcaatttggcagcagcttcatccatcaggtcaatagccttgtccggaaggaaacgttcggtaatgtaacggttactcaattctacagcggcaatgatggcttcatctttgatacgtaccttgtgatggttttcgtaacgttctttcaatccacggagaatggagatggtgctcagcgtgtccggttcggctaccataacggtttggaaccggcgttccaatgccttgtccttttcgaagtatttctgatattcgtccaaagtagtggctccgatgctgcggagctcaccacgggccaaggcgggttttaatatattggcggcatccatggcaccttcacctttaccggctccgaccaaggtatggatttcatcgataaacaggatgatgctgccttcggctttgattacttcattgacaacagatttcagacgttcttcaaattcacctttgtatttggctccggcaaccagtgcgcccatatccaatgagaagatttgtttgttcttcaagttgtcgggtacatcacctcggatgatacggtgtgccaagccttcaacaatggcggtcttaccggtacccggctcaccgattaaaatcggattattcttggtacggcggcttaatatttgtaataccctacgtatttcttcatcacgcccgataaccggatcaagttttccgctgcgggcagcctcattcaaattaatggcatatttgcttaaggattgataagtgtcttcactggattgtgaagttactttttcacctttacgtagttctgctatggcggagcgcagctctttgtctgtcattcccgcgtctttcaatatggtagcgacagtactctttacattcaacaaggccaggataatagcttccagtgaaacgaattcgtcacccatctctttggaatactgtacggctctttgtaatatctcgttgctttcacggctaaggtaaggttctcctcccgaaaccttaggcagtgagtcaatttgcttgtcgatgaccaatgcgatctgctgggcgttcattcccaatttctggaaaatgaagttggtgacgttttcacctactttcagtactccggccaacagatgcacaggctcgatagcttgctgtccgcgggcttgagttacgttcaccgcttgttgcactgcctcctgtgatttaattgtgaagttgttaaaattcatattgtatctcctttctaaatattattcaaatacctattgaaaacgtaactgtcactgctttgttcagtggcttttgcgatttcatttgataatcgtcaaatagtttgccaaaaagaaaaagaaagctaatgaagtaaaataagaagacaaaatggcaggctctccggcttttaaatgaaaaaaagtccgaattgtacacaaaaaggcagataactctttttgcaagcagatgataattgctatcttagcatcgaaatcataaaatgaaaacgagatgacaaatgaaataaagtttgcagatactgtaattctggtggatgtagcctatgtagacagggtggcgggtgatttatccaaacattttggtgacgtggtgggccgtaagttgccgaaagcggatttaccggtgttgttggaatgtctgtcactggatagtggaatacccttgggggagaatgcagttcaggtattatttatttatgacgaggaaagtaagaaaatggatgcttttcagccgtcggatttggaaaaggaattaaataacgtggctttcaaaagccagttgggagagtttgcactttattctttcgaaccatcggatatggctagtcgcgaagagttgtttctggagtctttgagagtggtggttgatgcaaaagaggtgaaacgggtgattattgtccctgccgaagaagaatatggagataaagttcctgctatattaaataaggtggacggaaaagaaaaaatgacggtattcggtatgaatcctccaaccagtgaagtcgcttatcagtgggagatgtttggattcgctgttttacagtcgttaggaattaaagcagacgaactataatcattaaaaaacatgtctgatttcaggttaagagtattcagtagtgttgcgaaaaacctcagctttacaaaggcttcgcaagagctgtttatcagtcagccggctataaccaagcatattcaggaattggagacgatgtaccagacacgcctttttgagcgaatggggaacaagatcttgctgactgatgcaggcaggttgttgttggagcattgtgagaaaattttggaagattacggacgcttggagtacgagatgaacttattacgtaatgagcataccggtgagttgcgcttgggagccagtactacaattgcccaatatgtgcttccccctttgctggcccgcttcatcgagaagtttccgcaagtgtctttatcacttttcagcgggaactcctctgaggtggaaaaggcattgcaggaacatcgtatagatttggcactggtagagggaaatacccggcaacctaatttgaaatatactccttttctgcaagatgagctggtggctatcgtccatactcatagtaagtggatggattatgatgagataactttggatgaattgaaagaagttcctcttgtacttcgtgaaagaggttcgggaacattggatgtattgattaccgctttgcataaacacaacataaagttatcggaccttactatccgtatgcacctgggaagtacagagagcattaaattatttctggaaaatagtgagtgcatggggattttgtctatccggtctattaataaagaactgtattcagggaagtttaaagtattggatataaaagacctggtgatgtttcgtgaatttgattttgtccaattgcaagggcaggatacagggctcccggctctgttcatgcaatttgccaatcattataaggaaaagttataacttataattaaaaacgattagattgtttttgaaacatatattacctttgcatcccgaaatggagaaataatgttaaaaagtaaaatatatgatttcagtaacagctttacagcaaaacagcaaaactatttatgtaggtttgctttccacgttaacggtctttttgttgatggactatattccggtattggcttcattttctcagtgggtcactccccccgtatctttatttctggggttgatatttgcattagtttgcggacaggcctatcctaagttcaataaaaaggtttctaaatatttgttgcaatattctgtagtgggattggggttcggtatgaatcttcaggcttctctggcttccggtaaggaaggaatggaattcacgatcatttctgtaatcggtacaatgattataggtatgtttatagggcataaacttttgaaggtagatcgtgatacggcttatcttatcagttcgggtactgcaatttgtgggggaagcgctattgctgctgtgggtcctgtattgaaagctaaagatagtgagatgtctgtggctttggctactatctttgtattgaatgccatcgctttgtttatttttccggtgttaggccatatgtttgggttagatcaacaacagtttggtacttgggcagctattgctattcatgatacgagttctgtggtgggagcaggtgcggcatacggtgaagaggcgttgaaagtggcgacaacaatcaaactgacccgtgcactttggattattcctttggcattcgctacttcttttattttcaagggaagcggtaagaaagtaagcattccttggtttatcctttattttgttgtggctatcgttctgaatacttatgtgctggatggtgtgcctcaattcgggcaggctgtttccggactggcacgtaaaggattgattattaccatgttctttattggagcttccttgtctatggatgtattgaagcaagtaggtatgaaacctctgattcaaggtgttgctctttgggtggtgatcagtcttagttcattggcttatattctacttttctgatagggatttattagaatattaaaaagtatgcggatgatatggattgtctgaaaaatcctgttatccgcatgtttttttatgagaatataatttagaagtaatagatgagtaatagtacagcgtttactccaatgacagtgaggaatcctttccatacataaggcagcatttcttttctgcgggaggaaaaaaatatggcatagaacatattcactacgatgttgctgatgatagcttgcatgatgcaggctcctacgatagttgctggaatgcttccgccttgtaacaggttaagtatgaaaggggtgatgtcacttaatcctgctgcaatagagagaatactcaaacctcctgttcctgcataaattaatgtatagtgagtcagaaatgtaaatactacgaataataaagcaaagatcagagcgactttgaattccagcggattactttccgtttccggttcctcaataacttcgcgctcgccttttatagtatgctttttatggatgaatataccgatgccggcggcggttacagacatgataagcagataggggtagatatccagaaagatggaagtgctgaatataaggatcaaaatcatgaaacgcaagaacatcatgctgatagcaagcatcatggcagatacatattccggtatttcatgcgtttgtatccgtttgcatttgcgggcaaggatggaaatggtagcggtgctgctatacagaccaccgataatacccgaaactagagtgcctgattcgcggaaaacatattgtttcagcaggtaggataaataggagatgcccgatacgactacagtagccagccaaatggtgtatggagtgagattgatacccggtataagaggttccttgggtaacatgggcaaaatgataccgctgatagccaaaaattttgccagtgttatcatttcatcattttgcatccgttgtacaagttcggtaaaggtgtgtttcatttctgtgaaaagaagcacggtgactaccatcatgacataaaaccaggaaggctgtgtacttatgataggagccatacaataggtgataagagcgatgatgattgttgtcactccaaacacgtggaactgggattgcttgacataataattgatacccagtaacatgcctaaaattatcccgcctcccataaataaatgcatttccttagggtcaagtatatagaggagatatcccaaaataccgataaaagtaaaagtccggtctgtgccgaaaagcgtagtttccccttctcgtctcagactgattctccgttgggataaaccgatgagtaaagagaacaatgttactagaatgaaagtaaccaattgctggggaaggtaatcgtacaacttttccataaatttgtcaagattaggttgatgtaattggtttttctgttcaaaccacatggacccctctgatggattcaaatggttttaaaacgcttgcttaaacttgctttcttcaaaaagtccttttaatttatcatcactttttatttggttgatgattgtggacagaactcctgctttgggcaattctactacaacgtctgttttatatttaccaccgttctgtcggctgttttcacaaattacttttaagttagcagcctcttgctgggtaaccatttggatcagatctaaaaattgttcccattctgcattaccgaatttattttgagacttggcagccatttctgcttttgccttgatctggttagttattgcggtacgggctgcaatgaccgccttctttttggaggcagtggcatcaccgctctgagctgatgctgaggcacggaagaagtctgcgtttgtgctatatgcatttccggtacaaggagtactttgtgcctgtgcccatgttgacattccaaggacgaaggctaaaaaatagatgaatttataatatttcatagttgtaattttatcaatctattgcgaagatagaagaatatttgataatataaacaagaaaagggaaaaaaaagatggagcttgctttatgaaatgattatatttgcagaaattaaatgaaaggttagtattcatggaacctgaattcaaacagacaatgcaacagtgtcgaattcattgttagttaataatttatatttttcctttggggtcatgtaacccaatctttttctcggtcttgagtttaagatgttttgaacgcgcattacctgttcattggttatgtccctaaagtccgtacccttcgggaagtattgcctaatcaaaccattgctgttttcattggctcctctttcccacgagtggtatggttttgcaaagtaaacaaaaatatttagtttacgtgcaatttcttcgtgaaaactaaattcttttccattatctgccgttattgtatgtatttggtctctaaaaggttccaaggcatcgatggcagctttagttagcgggctggcatctttcccgctaagtagtcttatccatactagtccagttaccctgtcgtttatagttaatagtgctcctttgtgattcattccaatgactgtgtcaatttccaaatcaccaaaacgtactttcttgtctactatcgtaggacgcttgtctatgtccacgcggtttttgataaaaccacgtccattagtcaatgcacctctcttcttatgacttcttccccgtcttcttaaatgcttgtataacaacttatctccatgctttttatcttcccaaatatactggtagattgtctcatgagaaactgtttccaagccctttgttcgcataaacccagtcacttgttctggactgaaatctttctttatgagtatatctacttgaattttcaagtcgtccgtaaacttcacgaagtgctttcgtgaacgcattctggacatatacttagcctgagcgagatccggtttgtaaatgccattacgtttatcactattacgacgtaattcacgacttatagtgctacgatgaactcctacaagattggcaatctcggttcttgactttccgctttgcagataagcggaaatgttatacctttgttcttcggttagctgtttcatattgcaactgaatgttggggaactggaagatgcaaagaaacaacttttccacaggggaacaaaagggaaagaaatcttctttctctgttcctctgaaaaattattcttttcgtatcttctcattgtcatcattctcactcctgttgcattatccgcttgaacttagggaatcaacaacaaaactctattcgttaaattacacaaacgcaaatacttatttatttgcattcgtgtttattgtaggtaatgtggtattgccgcaactttgtcatttggtgcattggggtggacctgctatgttacccatttatttcttcacattaataggtgcttataaatatggattcaaagtggggatgttgacggctgttctttctccgcttgtcaatagcttcttgtttggaatgccttctgtgaccatacttccggctatattggtaaagtcggtattgttggcgttggtggcgggatatatggcagatcgtttccgtaagattacgattcctgcattgctggggactgttatggcatatcaggtggtgggtaccttgatagaatgggctcttgtcggtgatttctatttggcggcacaggatttccggattggaattccgggcatgttgctccagatttttggtggctatgctttgttgaaagctattgcaaaaagataagttgtaaacatttgatgttatgctgcaaattgtgaaacagcctgaaaatggtggcgttggctatgttctggtagctgtcatggatggagatcccggtaaatggatgactttggtttttgataaatcatttaatagttaatagataaaatgacagggacattattatttttaggattaggaatgcaggaaatattattcattgcattgattgttcttttattctttggtgggaagaagatacccgaactgatgaaggggttgggcaaaggggttaagagttttaaggaagggatgaacggggtggaggatgatatagatgggaaagataagaaaggggaaacgaaagagtgacaaatgatggaacaacagcagaagatactgactttttgggatcatctggaagaactgcgccatgtcttgttccgtattgcagtggctgtggtatttctaatgttggtagcattcttgtttaaggatgagctttttgctattgttctagcgcctaagaatgctgatttcattatttatcgttttttttgccggatagctgatttcatggctatgccttcattatgtccggaagtgttttatgtgaaaatgatcaatacccaattggcggctcaattcattactcatatgagcgtgtctttttatacgggttttttgctggcatctccttatgttatttatcagttgttccgttttgtttcgccggctttatacgagaatgaaaagaaatattctactcggattgtagggtggggctattttctttttatgatgggagttcttttgaattattttttgattttccctcttactttccgttttcttgctacctatcaggtcagtatggaagtggagaacacgattactttgtcttcgtatatggatacattgatgatgatgagcctgatgatggggattgttttcgagattcctgtcctttgttggctttttgccaaactgggatttcttacggctgattttatgaagcggtatcgtcgtcatgctattgttattattctgatagttggagctgttatcactcctacgtcagatgtctttacattgatgatggtgtctgtgcctatgtatttgctttacgaagtcagcatttggattgtaagtcggattgggaagaaacagcgggaagaatccgtagaggaagtacttgaaaaatcatgagatgataatccttataaatgttattccgtaaaaaaggaagacctttcatgataggccttcctttttccattaggatccatactttattaaattttccagccaaaggcttctgctacggccggaaacacaatctttccgtttacaatattcaagccgttttttagtcccggatcgttttcgcaagctttttcccaaccaagatctgccaatctgatagcgtatggcagtgtagcattggttaatgccaaggttgaagtacacggcacggctcccggaatatttgccacacagtaatggatgataccgtctacttcgtaaataggttcggcatgagttgtgggatgggaggtctcaaaacatcctccttggtcaatggccacatctaccagtacagtaccctttttcatcagtttcagcatagggcgtgttatgaggtggggagcctttgcaccagggataagaactgcaccgattatcaaatcagttgttggcagttctttttctatattgtggctggacgagaataatgtttttacatttttaggcatgaactcacttaactgacgcaggcggggtaatgaaatatcacagattgtgacatcagcccctaatcctgcagccattaaagctgcattggttcctacaatgccgccgcctaataccagcactttggctggcttgacaccgggaactccacctagcaagatgccacgtcctccttgaggcttctccaaaaaacgtgctccttcctgagtggacattcgtcccgccacttcactcatgggaatcagcagaggcagtcctccttgtttgtctgttacagtttcgtaagctaggcatactgaaccactacgcatcattgcctccgttaattctttgtcacaggcaaaatggaagtatgtaaataccagttggcccttacgtaccaggttatattcacattcgatgggttccttgacttttataatcatctcggcaatggcgtacacatcttctatagtaggaaggatacgcgctccgactttctcatactcttcatcggaaaatccgctgtttatacctgcggtgtgttgtatatacaccgtgtgacctctctgtaccaactcgtgtgctcctgcaggggttaatgatacacgattctcgttgtttttgatttctttaggaattcctactatcataattgtcacatttaaggggtttgactgcctcaaagataacaaaatgtcagaaaagtaggttttgtctggatatgtttttttcgtaataaatgtatgtttagcaacattgttttaagggatattctgttttttatttgtaagtttgcggagagattcaaaatttttgtgatgagttctccataaaataaagaaaatgactttacgaaattatataatcatagcagctttgggcagtgttcttgctgtacgggcacaggaagaaccggctgctcctgtattccgtcctccttttgattttccgcttattctgagcggtaatttcggtgaactgcgttctaaccactttcatggaggagtggattttaaaacccagggagaggtgggaaaacctattcattgcattgccgacggatatgtgagccgtgtactggttactcccggaggatatgggcaggctatttttattacgcatcccaatggatatacttcagtatatggacatgtgttgaaatttgcttctgcagtggcaaaagtggtggaggaatatcaatatcggcatgaaacttttgctgtggatttgaaattcgagcctcatcaggtcagtttcaaagctggagaaatcattgctttaagcggtaatgaagggtattctttcggaccgcatctgcatatggagatacgccgtacggatactggtgaattgatagatcccttacagttctataccgataaaattaaagacactactccgccacgtgcgtcaatgattatgctttatccgcagcggggcgctggagttgtggaaggctcacaaagaaaaaaatccatatctgttgcttctttgggacaaccggtttctgcttgggggaaaatagccgctggcattaaggcatacgactatatggatggcacacataataattatggtgtgcgttccgtggtactctatgtggatacgacagaagtttttcgcagtacggtggatggcgttttgcccgaagagaaccggatgattaatgcctggacagactatgaggagaatgtaaagaggcataattgggtgatgcgctcacagattcttcccggaaatagtttgcgcatgttacaagccaatgatgaaggaggggtggttacgattgatgaagaacgtgattatcattttcgttatgaattagctgatttatacgggaataagtcgacttatcgtttcattgtgcgtggccgtaggcagccgatagaggaatatcatccgcaggtaaaacattatttggcatggaataaaggtaatgtggttcaggaaccgggtatggaactggttatcccccgaggaatgttgtatgaggatgtggcactgaactgtcatgtggttaaagatacagctgcaatatcttacgagtaccagttgcacgatgagccagtagctttgcaggctgggtgcacgttgatgatcggggtacgccatcttcctgtagaggatacgtcgaaatattatgtggcccgtaagtggggaaaaaggaaaggttcagcaggaggaatttatgaaaatggttggatgaagacttccatccgtgaactgggaacctataccgtagctatagatactttgtctccacgagtgaccccattaaataaggcacaatggaagacaggtaaggttcagttcaaaataggagatgcggaaacgggtattaaggattataaggtgaagatagacggcgaatttgccttattcggtttcagttccaaaaatgcgaaattgtggatgaagcatcctgaacggttaaaaaaaggagtcgcccataaattggaattggtggtgacagattattgtggaaacgaaacaaaagaggaatatgaattttgatggtaaaataagtattatacacaattaaaaagttatatattaatgaagaataaactgattttaggtgctgcctttctattggcggcaataacagagagtttggcatgcactaacctgattgtaggtaagggagcctcggttgatggttctgttatcgtttcttattccgctgattcatacggaatgtttggcgagttgtatcactatcctgccggtatgcatgaaaaaggaaccatgcgtgatatctatgattgggattcgggcaaatatttagggcaaataaaagaagcgcgtcaaacctataatgtggtaggtaatatgaatgaatttcaggtaaccataggtgaaactacttttggtggacgggaggaattggttgattctaccggtattatggattatggaagtttgatttatgtagctctccagcgttctcgtacagccaaagaagccatacaggtaatgacggatttagtaaaagaatatggttattatagcagtggcgaatcattcagtatcgctgatcccaatgaagtctggattttggagatgatcggtaagggtcccggtgtgaaaggtgctgtatgggtagcagtccgtataccggatgattgtattgccgcacatgctaatcagagccggattcatcagttcaatatgaatgacaaggataattgtctttactctccggatgtgatttctttcgctcgtgaaaaaggttattttgacggtatgaataaagatttcagtttctcggcggcatataatcctttagattttggtggtgtacggttctgtgaagcgcgtgtatggagtttctataatatgttcaataagtcggtgggagatacctatcttccttatattcagggggacagtaaagaaccgatgcctctttatatcaagccttcccgtaaactttcagtacgtgatgtacaagcagctatgcgcgatcactatgagggtactccactggatattactaatgatcccggtgcaggtccgtttaaaactccttatcgtctgtcgcccttgagctttaaagtaggagatcaggaatatttcaatgaacgtcccatctcgactcagcaaacggctttcacttttgttgcacagatgcgtgctagcctgcccgatgcaatagggggagtattatggtttgggacagatgatgctaatatgacagtgtttgctcctgtatattgttgttcggatcgtattcctgattgttatagcggtaaagaagccgactgtgtaactttttcatgggattctgcattctggatttataattgggtggccgatatgattcgtccacgttatagcctgatgattgatgatatgcgtgccgttcaaaataatttggaagatacttatgcgaatgcacaggctggcattgaatcttctgccatgagtttatatgagaaagatcctgtaaaagcaaaagaattcttgactaactatagttgcatgacagccgaatcggcaatagacagctggaagaagttgggtgaatttttgattgtgaagtataatgatggtgctgtgaaaaagatggcaaaagatggaactatacttcgccctgaaaccggtcattgtgctcctttggtacgtccgggatatcccaaagaatttttggaagaactggtaaaggccaccggtggacgttataagatgaaataggatatatttttgtatgttctgaaagtctgattaattagtggaggggcagattataattctgcccctgtttgcataataagatagttttttagattgtattcaggatgcctaggagctttactgattgttatataatagtgttttttaccttgtatggtcttctatttttttatgacagattatttttggggaataatcctttatatctctaattttcttcttccaaatttctaggatttttaatttaattcttttacatttgtcaagacgtaaaaatcggatataattataaaccttataaataacaaaaaattatggaaaatgaagaattgataaagcaagtgacagagaaagcagagaaatggttaacacctgcttatgatgccgaaacacaggctgaaattaagaaaatgttggcgaatcccgataagactgatttgattgaagcattttataaagatttggagtttggaacaggtggtttgcgtggtattatgggcgtgggtagtaaccgtatgaatatttatacggtaggtgctgctactcaaggcttgtctaattatctaaataaaaattttaaagatctcgatcagatttctgtagtggtaggtcatgattgccgtaacaacagccgtttgtttgcggaaatttctgccaatattttttcagcgaatggtattaaagtatatttgtttgaagatatgcgtcctactcctgaaatgtcatttgctatccgtcatttcggttgccagagcggtatcaatattactgcctctcataatccgagagaatacaatggttacaaggcttattgggatgatggtgcacaagtattggctccgcacgataaaggtatcattgatgaggtgaacaagatttcatcggctaccgacattaagtttgaaggtaacaaggatctgattcagattgtgggcgaagaggtagacagcgtctatttgaataaagtgaaaacaatttctattgatcctgaagtgatcaagcgtcagaaggatttgaaaattgtgtatactccgattcatggtacaggtatgatgttgattccgcgtgcattgaagcaatggggatttgaaaatgtacataccgtgcctgaacaaatggtgaagagtggcgattttccgactgttatttctccgaatccggaaaatgccgaggctttgtctatggctattgatttggctaagaaaattgacgccgacattgtaatggctagtgatccggatgctgaccgtgtaggtatggcttgtaaaaatgacaaaggagaatgggtgctgatcaatggtaaccaaacctgtttgctgttcttgtattatataataaagaatcgtattgcgatgggtaagatgaaggatgatgatttcattgtgaagactatcgttactacggaactgattaaatctgtcgcagataagaaccacatcgaaatgttggattgctataccggattcaagtggattgcacgtgagatccgtttgcgtgaaggaaaacagcagtacatcggtggtggtgaggaaagttacggtttcctggctgaagattttgtccgtgataaagatgctgtttctgcttgtacattgttagcagagatttgtgcttgggcaaaagatcagggcaaaacattgttcgaagttttgcttgatatttatgtggagtatggtttctcaaaagaaactactgtgaatgttgtgaaaccaggaaagagcggggcagaagagattaaggcaatgatggaaaacttccgttctaatcctccgagagaaataggcggttctaaggttgttcttgtcaaagactttaaaactttgaaggctactgatggtaatgggaatataacagaaatagatatgccggaggctagtaacgtattgcaatattttacagaagatggaactaaaatttcagttcgcccgtcaggaacagaacctaaaatcaagttctatgtggaagtaaaaggtgaaatgggttgccacaaatgtttcgatgccgctaatgcagctgctgaggaaaaggtggaagccgtaagaaaatcactgggaatttaatcgagggtaagcgttgggcgaaagtctgggagaatattcattcataaataaaaaaagggggggagagatgtatttctctatccccttttcttttatttccatgccatttatatcaaaatctacacttctttgtttattttttgttgtaactttgccttctgttttaaataaggtgaaagatatgatgtggttacttctggcatttctctcggctgcactgctgggattttatgatgtatttaagaaacagtcgttaaaggacaatgcggttattccagtattatttcttaatacgttgttctctagtttgatatttcttccttttattgtattgtcagtgtggaggccgggaatattggagaattctattttttatgtgcctgttgctgggtgggaggtgcatcgttatgtggtgttgaaatctgttattgtcctttcgtcgtggatgttgggatattttggaatgaagaatctgcctatcacgattgtgggacctataaacgctacccgtccggtgatggtgttggtaggagctttagtggtctttggtgagcgtttgaatttttaccaatggattggtgtgctgatggctgtcttctctttttttatgctgagccgcagcggaaagaaagagggaatagattttaaacataataagtggatttattatgtggtaatggcggctgtgttgggagctgtcagcgggctttatgacaagtacctcatggcgcctgccgatcaaggaggtatcggactagatagaatgattgtgcagtcatggtataatatctatcaattgtttatgatgggaggtatcttaatattgttatggtggccgaagcgcaaatctaccactccgtttcattggcattggtgtattattctgatatctatttttctgtcggcagctgattttgtttatttctatgccttaagcttggacggggcaatgatttccattgtatctatggtaaggcgtggcagtgtgcttgtctcttttatatttggtgcgatggtattccgtgagaagaatcttaaaagcaaggtcgtggatttggtgctagtacttattggtatgatatttctgtatttgggaagtcaataagaaaaaaagatggggtgtgactcatcgtgcataccccgttgttcttgattactctataatgattttatattctacatcaaacgtttcttttggttctagtttctgtatccattcacggtcttttaattcgcccgaataccctacagaatcgcaacgtccataccatggttcaatgcaaacaaatgggcaatcgggatgtgttttggtaggagaccacaaagctactaacggagaattaaattccaaactgatatgaggctttttctttttatccagtaaggttatttttttcagttgtttattgtcaaaaatataagtgtcacaatcaaaagtatgaatatcaattggcatcagcccttctttatttaattttagtacatgacgttctggtgatacgcaacctttttctattggcatgatatattctaaatcagactttcggtcaaaaacaaagaagccacgatcctttgtagcagcatcgaacttggggaaatagaaagctggatgtgctccgatctggaaatacatatccatagctcccagattttctacacgccattttacggtgattttattttcttctaataaatatcccaccaataggcggaagggaaaaggaaacttgcccaatgtatcaggagtgctttccaaccaatatacagctcctttgtcttctttataggttagtttgaaattcatatcacgtgcaaaaccgtgttgccctatttcataagtgtttccggcatgacggtatttattattccacacacgtcctactatggggaaaaggacaggtgagcgccgtccccaaaatttagcgtctccctgccaaagatattctttgccatcctttttgatactttgaagctcagcgccatgttcggctatttgtacagtcaggacagaattagatagtgtttccatgtttcttcatttataaattcttttttcaaaggtagggatgtttcatgacatgacaaagtgaatcttcatctttgtgtaaattttatctaaaaggctttttgggatcaaataaattttaataaaagcttatgcttgtgtttatttttgcttatgtttgtcaataaaactatgaaggaggataagatggagaacatacatttgatatttaaatttttatggtatagtatattattttgtatatggggagtatcttgtacaagttccggaacttataaaaagactcaaatggatatttatatgcagtattatgattttataattgattcactgtcaaaaaatcctaattatgtatgtacccggactgccaggcaaatgtcgtttaccacagatagtgtggcgtattgccattatcttgttcttttggcaaaagcatatatgtttaagtccgagatggattcggctaaacttagcatggatagagcggaagtattttgcgatggagctgaaccgtcaccgttaattaatgatttgtatgctgagatttacaatatgcggggtaatgtatgtgttcgtcaagggttgacagattcttcagtggtatgttttcaaaaagcgttcgattatcgtttgaagggtagtaacagagatatgcttcatgatatttctattaatttggctgatgcttttgtccgtaccggtcattatgataaaggtgcgatgtggtatcgtaaagctttgtcttactgtgattcattgaagattcctgaagaaaagcgttttcctgtttattacggattggcacaggtttatatggaacttcgtgattttacttcttgtgattattactatgaactggcggctcggcaatatgataagatgcttccatttgagaaacatatttatttgaataatcgtggtaattcttattattttcgtgctgattatcctaatgctttagaatttttcagaaaatcattattgttagctcgttcttatccagatatgatttttgaggaacatctgactgaaatgaatttgggagaaacttttctgttgatgaatcaggttgattctgccgcatactatttaaatctttgtagtgatttttttcgttctatcgaaaatcagacagctctctattatttggatacccagttgattgaacttgccttgaagcagaataatttgcctttagcacgtaaacgtatgtctgaggctatccagcctgattatgtggaaccgaatatgcagcatatccgtaaccgttacctacaacattattttgaagaggtgggagatttcaaacaagcttattattatcaaatggaaaatcagcgtattgatgattctacacgtaatgagcgtattaaaatgcgtacagctgaaattgatctgaaatacagtcaggacaccacgctgatgaagcagaaaattttcattcagcaaaaagagaatgaagttctggcgctgaaccagacgctttacctgtggatgtttgcctgcatctgtattctggggctcgctgtatttgtctacacatacaacaagagacagcgtttcttgctgcaaatgagaagtcagaatatgattgccactttgcgtatggagaatatccgtaaccgggtttctccccatttcatttttaacattctgaaccgtgagatgggtaactacaccgacgagcaagtcggaaatatgcgtgggctggtaaaactgatgcggcgcaacctggaactgaccgagcaactgtgtgttaccatggctgaggaactggactttgtcaatacgtttatcaacctggaacgtgaagcattgggagatagctttatactgtccacatccatagatgctgccatccatcttgaccaagaaatacttccttccatgatgatacagattccgatagaaaatgccatcaagcatgccctgaaggacaaagaggggatgaaaagactgtgggttgacatcagaaagaccggggaaggaatctgtgtcaaggtgcgtgacaacgggggaggttaccgggtaaacagtgccaactacggtacaggcaccggtataaaagtgattcttcaaaccatacagttgttgaacgctaacaataagaagcatatcgatatatccataaccaatgtgcagttggaagacggagaaaccggttgcgagtttgctgtcttcctgccccatggttatgattataatttgaaaaagatggtttagtcattatttttgctagaatagtgtccgaaacggtcgctatagttccataaccagagtgtcgggtttgtgcgttaaaacatgttttaatacttttgttccgttaataactaaagcaggattgtttactatggataaactatacagggtcgtaataattgatgatgatgagttctctgcggacaatctttgtctggaactgaagaaatataacaggctgtctatagatgggatggcgcgtaacggtgtgaatggccggaaactgctggaaaaggttcatccggatttgctgttcctggacgtggaactgccggacatgaagggcatggaactgctggaacagataaggggggcaatcacttggaatatgcagattgtgttctatacggcttatgataaatacatgatttatgccatccgtggggcagctttcgactacttgctgaagccgatagacaagaaggagctggaagggattatcgaccgcttcatgaaaaaggaggaagagtcggcagctgcatctttggctattcctgcgcgtgtgcattcggtcggcgagcatacctttatgatatccacgcctaccaatgatttgcgtattctacgttccattgacattggttttttccgttataactccgaccggaaactgtgggaagtggtgctgaacaaccagctgcctctgctgctgaagaaaaatactacggctgatcatatcaagggatatgacccctgcttcgtccagatccatcagtcgtatatcattaatatcaattatctgatgatgattaaggagaaccgctgtgtcatgtttcccccgtttgagaatattacggaacttcaggtttccaagaaattcagaaaagaattacaggataggttttatttgttgtagtgaatctattgataacattgaaaatacaagtttatagaaagtgattttaaatcacaatggaagagcaggagtcgtgagattgctgcttttttgcttttagtgcttaatttttcctttgcggtatatggaaatgaggttatatagtcattaatttagatagaatagtatgcttattaggctgtttgatactttctcttggttttgtgaatttgtaaaatggcgttaattgtttttctttgaagccacataaggttaaaaaaaagacatgtatatgaatgaagtaaaaaaagtaatattgtttttgttatgctgtgctataccttttagtttttatgcacagaaagcacgccaaaatgctgcaacaaagaaatgggggtatgagcagaccgaaaataaaggatggtgggaaaattcaaaatatagaggtaattctatgtttggtgaatgggatgcggctttagtaaatcaggattatgagataaattggttgatttctccacaatatgaagaggtgactaagagatttacagaaaagttggcgggagtagttttaggaggaaaagtaggttttatagacatacacaaccgttttataattaaaccgcagtttgaaaatgtagatgatgttcatgggtttaatttaggactgtctgcggtaaagaagaatggcaaatttggctttataaataaaaaaggagaatttgtcattgaacctcaatttgattacgctgataattttagagataacatgttggctacaatcaagcaagatggtaagttcggggctattaatttgaggggggaaatcgttgttccatgtaaatatattctagaagaagcaatgataagcgttcctatatccaataaggtatatcgtcagaaacaagaagaaatgaaaaatgcgaaaggaaacggtgattttgatgatttgcttgataaaatcgctgaatgtagcagagaggtcaatgaaaaaattaataatcctggaacagaagttataaccgattctctcagaataagggaagataatggtaaaatgggctttatagtgggagaacaaattgtaattcctacagaatatgaggagcttataatagctgaagatggattcgttcttgcttgcaagcgggataaatggggagttttggatatatatgggcgtactatattgccttgtgtttatcaatgggtatattatgatgtatcggcaaaggtctggattgccaaaagttttgcaatggggttatataatagtcaaggtgctttattactaccgggaaggattgattatataggtagttttgtggatggcaaagcacctgtttggctgaattccgtacttggttggatagatacgaagggacaactctctgatggctttgcagaggatgtgacagaatcctttttgaaagaagaaaaaaggggagtggcaggtgcttggggtatgtttaatttattaacagacttgattccggactatgccatggcccactattatatgggaaaaggacaagtggcagatggcatttattctaagggaatggagcatctgaagatagcggcagaattggatccggataatgaagaagtagcgttggcgctgaagcaagccaaaaaggacaagaagaaaagaactttgaatacgattggttacattgcaagtgtgcataatgatttggaatctacgaactctaattcttttaaggatgaaagcagaaatcaaaataagccttcatccggaattagtctgggggtttctatggatgagatagatgcccttggtggatctacagctactgctatagcaggaggcagtaatcattgcgattttttgaaatatgtgttagaagatcttgaagaaaagattcaggagaatacaggcaaattgatgggagagtattatcggaaagtgaaggatgaatatttgcagtttgccagtaaagaagggtgtgaacaataatatataattaaagattagaattatgagagtaatgaatgtgaaatttgtcggtagaatcattatgacgattctttttgtattcatctgtattggagcgtacgcaggtgatgaccttttaaagtatgagatagagggagaaggagtaggtgtacagggtacttatttagtaaaagtgacagtaatccagaagaaaagtaaattggatatcgatgtgatcaagaagtgtgcggttcatggggtgcttttcaaaggattttccagtcagacttcacgtacccggcagaaacctttggcaggaagtatggtggtagaacagcagcatcaggattattttgatgtcttcttccaaaaaggaggttcttatataaattttgccaatatgataggagagaatctttcagtggtgaaaatgggaaagcagtatcgaatttcagcagtggtttccgttgcgaaagacgccctctatcaagagctggtatcagccggagttattaaaggactaaataatggattttagcttatgtataagagattgattgttacttttctgatactggctggcgcactattgcctgcttttgcccagcaggctcatgaagtgttttatctgaataatggtacgtagtgaagggagttatcttgaagcgtacggatagtgaaaataaaggtatccaatggtgaaatttatcagtatcctttggtcgttgtggaagtttgtggaggagagcgtcattttgagaatattgtattattgaaattaggctatgaattttaaagaagaaaaaattatgaaatatctattttatacatggaaattgggatgtctgcttttacttgtctttgccggatgcagcagcaaaaagagtgtttcttcctatcattcctttgagagtgaatgtttgggagtagaactggatggttcggagacacttcgagcttggggcagagggaaaaatcgtactgatgctatagagcaggcaaagaaaaatgcagtaagggatgttttgttcaaaggtgttgctgccggtagtcgtgaatgtagtgtgcgccctttggtaacagaagtgaatgcacaggaacggtatgcatattattttaacgacttttttagagacggaggggaatacctgaagtatgtaagtatggaagataagaaaacaaattctgacatgaagacttctaataagactcaaatttcttattccactacggtgcgtgtgcttcgttctcaattacagcagaaactgatagaagataaaattttaaaaccataaagacagaaaaacatgaaaaaattatatgctattttatttattgtagcacttgtacacaccggagtgtatggacaggctaaaaaacccaccattatggttgttcctgctaatgtgtggtgtacccataatggttatacacaaaaatataacaatcaaggcattattaccgaacttccggattataaaaaggcgttggataatgatctgaacttggtgaatgtcataacgaaaataggtgagttgatggctgaaaaagattttccgttgaaagatatggcatcttctattcgttccatagagcagagttcggcggaacatgagatgactaccagttctacttcgggagcttcactggcagagtctcctttggatcggttaatgaatagagctaaagctgatattctgattgaagtagtttggaatattaatacaatgggccccaaacgttctgttacttatactttgcgaggcttggatgcttacactaataagcaggtcgcagcgacgcaaggtacgggagaaccttctatggctgctgaagtggcagtattgttggaagaagcggtagtagacaagatggatgctttcgtaagtcagttacagaaacattttgatgatttgatggctaatggccgtgaagtagcattagaagtccacgtgtttgataatgggagcggtgttaatttggaaagtgaatttgggggggctgaactacaggaaatcatagaagattgggtggcgcagaatacggtggctcatcgttttagtttaactgatgcaactgagaatatgatgctttttgagcaggtacgcattccgctttatcgtgaaaatggaatggctagagatacaagaagctttgcaaatgatttgcgcaaatatctcaatcagaaagccaatcttacctgcaaagtaatgacgaaagggttaggtaaagctgaattggttatcggagaaaaatagaaaagatatgaaaataaggaatatgatatttaccgcttggtgcgcatgttgtgccatgtctgcggcagcacaggattgtgagataagccttacaatagctaaagctgcccagaaagaggaacttccatctcaggtacaagagattttaggaaatcgtttagctgcggcagtggccgctcaggggggtgttgccaattccaattttacaccattctttatcacagctaaggccaatactttatataaggaaacattgtccggtcctcctgtcagtacagcgcttactgttcaattgactttgtatataggagatgcagtagggcagaaagtattttctactctcactgtggatgcaaaaggagtaggtactaatattaaccgggcatatatcaatgctttccgtgcaataaatggcaaaaacgtgaaaatgcaagaatttatacgcgaagggaaagaaaaaattatctcttggtataatagtaattataggcaaatattgataaaagcgcaaaaaagtgcttctatgcatgagtatgatgctgcattgtattatgttacctccattcctgaatgttgtgtcggctatgaggaagctagtaaactgatagacacttattatactcaatatgtgaattataattgtcaattgattatgcaatacgccagatccgaatgggcaaagtcacccgatgcggaaggtgcttcaagggcttttgactggttggttttcattgagccgggaagtagttgtgaaggtgaagctaaagctttgtataatgaaataaagcaaaaggtgaccagtgattgggattttgagaatcgtgagaaatataaggatgaagcggggctgaaaaagcagaggatagaagctgccagagctataggtgtagcatttggtaatgggcagcaaccggttactactaatattacttggctccattaattcaagttcaaatgattttaaataaaaagaatatgagaaataaaaaagttatcctaattctatgtctgctggtgctggtcagtggctctgtgcaagctcagaggttgaaggccgtgcagaatgaaaaggggcgttatggctttatgacggaagacgggacagtagtgataaagtataaatatgatgaagctaccccttttaaagacggtatcgctaaaataggaaaagatggaaaatacagtctgattaatgaagatggtgaaatcattacaaaacggaaatatacatatatcggtgaattttataacggggtttgccccgtcgctgaaggtggaaatactaaaaaaggagtaatgctaacaacgggtggactcataggcaataaagctagtagtaatacaggtgaaaaatgggggttgattgataagacaggtaaggaaatcctgaaaactgattatgaggcaatgggagatttaaataaaaaactgatatatgtcttgaaaggcaagaagttcgggttcattgattcagctggcaatatcatagtgaagcctacttataattttataggcagtttcaacgaccaaggaatctgttgggttaatatcggtggcaaatacgataaaaagaacaacatggtgtctaaaggtaaattcgggttaatcaatgaaaatgggcgggaaataattcctgccaaatatgaagatgtgggcaacttccctattttgcgagataagaaaactggagctttgcttgatgaggctgccttttatactaaggcagaccagtccgcatttcctgctaccaagcaggagatacagagcttgctgcttcccaagcctcatgctgctgagtcccagttgccttcatcgagggtagattatttttatttcattaataagaaatcccaagggttggtagatgtccatggaaatactattattcctttaacagccaatcaggctattcttcctccttcagacaatatgcttaggcttgctaaagtggaaaagaagcaaatagctaaagcttattatgatttggatgctgaagtgatggtcagaataccttcttcagaaaagggaaagtttggggctttcagccataatttagctccggtttcattggatgatgaattgtatttcatagataaaaaggggaacaaggtgattggtggcctgtcaaaggctttcctgagcaatgaaggataccgggtggtacaaaagggatcggcttttggtgcaattgattctacaggggcagttgttattcctattgaatatactaattcgcttaccagtgtgaacaatgggcgcttgggagtacaaaaaaatgcttcttggttttatgtagatatgaaaggacaaatcgtatccgataagtatgaccgtataggcaattttcatcgggggtatgcatccgtatgcctgaacaaattatggggggctattgatttgcagaaccgggttgtcgttcctttagagtggcaaggtgtagctcctatagtcaatccgcaattgatatgggtgaaaaaggataacctgtattacctttatgatggggtgcaaaagtctgttcgtctgaagcagggatttgccaatgcatccaattttgataatgagatggcttatgtgatgtccgatggaaagtgggggattattgatccggatggcaagatactggtgccttgcttgttcgaaaaagaagaggatatggtcttggccaaacaatatatgttagcggaagacaagaagagcttgaccgaagtagaggctcttcgagtgattgcacgttttgacccggatacaaatatgtttaagataacctctgtcattccagataaacattgggattattaattattgaatgtttgaaaaatgaaaagattcattataatacagttgttgacggtggtattcgccgctcaaattcaagcccaaggagacggcgaaataaaatatcgtcgcagttctctttatagcatgatgatcaatcacgaaggaagagaatttggtgatgaaataaaggatgtttttctcaaaattcctgttcctgataaatacaataatcatgatttaagtgtaaaagtaatctatacttctgaaaagaaattggataaaaaccatgaggagatagatgaatttatcagaaataatggtattgccagtcgtatggtaggacgctggtttaaccgtgattacatgacaggggtctgtgatgtagaactggtgaaagaacgagggctgtacaatgcttccgaactggacaaggctttggcatccaagactcaacgcggaaacgctctgttggaagatgccggtgaggacttgattggaaatacttttcttattgtgaatgatattcgctatattgaccgttcaaaaggttcaagtgtgtggggaggaattgtcaaagggctgggtgcggcagcggccatttacaccggtgagacatcctatatggatttaggtaattctacgggagatatagttgcatcctataaggggtttaaagtaaatattgatacttatctctatcaactggtttgggatgaagagactgcaacaaaattctatactcaatattatactgataaggataataaggagaaggtgaatgctttcaataataaccgtaagatgttcaagttgaagtatgtgggcagccagcatagtgatggaagtaacacttcctttttgggtattaacttggacgagccccagcaaatggtgcgaaaggcatgccaacgtgccattgatgaaaatatagcgagtctgcaaaagaattttgaccagttcaaagtaaatacccccttaattagtgtttctccccttaaagcttatattggcttgaaagagggagtcactgaaaagtctaaatttgaagtactggaagccgaactgagcaaagaaggcaaaatgacttataagcgtgtaggagtgattcagcctaaggagaatctgatttgggataatcgttatatggcttccgaggaacaggcttatggttcggactttggttttaccactttccgaaaagtgtcgggtggcgatttttatccgggaatgttgattcgtgaaataaaataagtgtttaagttagccggcttcgtcaacagaagtgaaaattggttgcttgccaaaaagatttgttgatatggctgaatagtgaaattcaaaacaaacaggcgttcatttccgaggaataaacgcctgtttgttttatgttttaaatggttctatagttctatactgccagtctggagaggtggtgaaaagtataactgggcttttgatggttcttccgattctatatcatatagagctggaatgtgaagcctaaatttatatattttcaagcttgtcttatttgcataatttatttattgtatatatagtcgttaattttagctgcttggtatctattttagtgtgtttagtgtaaatcttgacaaatgatagttttttgaatataaaagttgcaatacatttgcaaatgtaaacttatagagtcaattgttacgaagtatggaaaagacaattattgcagcattttaatgctaatttcgttaacatcgtatgcacagggtttaatgtggaatgcgaaggctgctcaatatgagcagcatgtctagcgtagaggaatctaaaatgcatccaggtttctatgcaggaataggagctgagtatgctattgatgaaaattggtctgtccgtctttctttattgttcactatgaaaggagtgaaacaagattacaaattttaataaaaatactgcattatgaagaaactgttttttatcatggctatgtccgtatgtgcatttatggcacaagcacaaactacttccggtattcgcgtggggttaaatatgaccagtgctacagggaagtataatgatcttatggcagatcaagattataataataaaagctatatgggttacagtgtccattattttatagatgttcctgtgattggcaactttagtattcagcctgctattggactttctatgaaaggtatcacttatgaatatgataaatttactactaaaaaatcgcatcgggtcgatttggattcttataagaaatatgatgtgacagaatctcgcggcactagtgtcactcaaaaacataatctgggctatttggacgttcctattttatttgcttatgctttacctttgtcagaatcgtttagggttcagttgggagtgggcccttacttctcttatgggttgtttggtaagtttaaatatgagtcggatacatatttgacagtatcccccgacaaatatggagaaaataaacataccataaccaaagatgattgtccctcctttggcaagaatgatgatggggacgatcctaaaggtaatattaaccgttttgactggggaattgccatacagggcagcatctattggaagcgcttgtttttgaatgttgcttatcaaaaaggtctgaaatcggctaatattactgacgagaagaatgaagggaaagataaattggctctttccaatttgtcgttagggttaggctttatattttaatttgtgaacagactgcaggaactgttggaaaatagaaagatagaggggcttcagaaatttgatgaaactcgtgcatcctttcttgctgaaatgaagaatctgtcgggtgaaatggaggttcacttggaaactcattttcttgtttttagagataaagcggtgtgaatttgatgttccatcgcttttcctatgctattggaatgagctctgattagcttgcccgataagttatggaaaagggaatttggtttcggggtcagtcattatagcaagcaggtggcaggatatttttttacacgtacatacgtatgtgtagaaatctgtttccggtcacagtcccgtatcgttccgaaagcctttattcttttcggaaaaaacaaggatgtttgcaaaaaagatgaagacgtctgataaaaagaacaagacgtttcgtttcaaagatctatatcttccgacctttagtttaagtctttccggctatcggtttatccttctcctccgaaagggaaggatgctgggtgtaacggcaaaacttggtacaggatttcgtggaacttgctgcaggatccgacagaacttgtatcaagattctgaatactttggcaaggaaagtcgttgtttcgaggctgcacaagtttaccgtgttcaccgtacaagcctatcgtgttcattgcacaggcttgtcctgtctggtggacaaacaaagtaggtttgtaccatgtaacaaggtggataaagtggtggcagtaggcatttttgtacataaaataatgtgctgccaccacctctctaacttcctgtttataggggttgcagggaataggtgacaacagtgacagcagaattataaaactctgttgtaggaaaaagtgggacaattggagacgatccctctgtacaacgtacattatcttttattttctttccccggataattaggtccataaagcatggtcttttccttgaccaccaatcgaccgtccttcacgaactcttcgccacgttcacttaaatgacggatcatttcattacgcatttccgtcagctgcttcctgtattttttgtcattgacggcattgtgcaattcctgagggtcttgggttaagtcgaataactcttcggtaccggtgtggatacgccatatatattttattttgccgtcagtcagtgcgcaccaatagttgtcatcactgtaacaggtggcatgttctagatccagatacttgcgccaggttgtttccatgcctttggcaagtggcaacaaagaacggccgtccatgtcagtggggatggtcacatcggctgcatcaaggaaagtgggaagaatatcacgtaactctacaggagcgtctgtttttcccggtgtaacgtggtcgacggaaggccatttcacgatgtatggcacatgagtggagccctcgtatggataagtctttctccagtgataatggtcgcccatcatatcgccatgatcggaaatgaaaacgattaatgcgtcattatacatgtccttttctttcaatgtttggataattctgcctatctgttcgtcaatgaaagtgatgttggcataataatgacgtctggaattgcgtgcatattcattgccaaaattaccgtatggagcgtcttgtgccgtcttttcaggatttagtttttttgcgtatttgccacaccagtctccgatagcaggatcgggtattagggcatcctcatacatgtccagatatctttgtggtggatcatacggactgtgtggacgggcaaaagaaactttcagaaataacggtttgttggtcggatcgtagttgctgataagttcacaggccatttctcctgtccaataggtaggatggaggttttcgggcaatttatatatacttgccgtatggtcgttccagcctataccggtggcgtcaggattctttccgggagcttttgtttggaaccattggcggtaatcactggtgaagttctcgtcttccacgcgtccgctttcatctagcagagtgccttcgaaaccatgttttacccgttggggatgccagtgcattttcccgattccaaaagtataataaccagcgtcttttagcatctgtggcatttcgtatttatattcgggagatacttttccatatcccaacaagccatgatgccaaggagaaagtccggtcagcagaccagcacgtgccggagtgctgcttggacaagaagaatagccattcataaataatgttccctcggcagctagtgcgtctaggttaggggagataacagcatcgtttcccatacagcctatggcatcggctcgctgttggtctgtcattatcagtatgatatgaggatggttttgtgcgtatgcaaaagaggagcacagtccggctgtgacagccaatgtgtatttcaggttggttagagtattcatgtttataggtttttcataatgttatgtggcaaaggtaggaaatttttggtaaccttaagccataaatagtgatggtaaaagtagaaatatttgaaattgaggtcttattttgtgcatacgtatgcgtggcctcatatatactaatggtagaaaaaggttataaaaaaggcttgttcatgaagaacaagccttttttatatgcatgtattagaaattattcactccaattcattgcttccatacgtttgtaagaagcataacgtttcttggccatttcttcgcaagcagcaaacagatcagcagcttcagcaggatactgcttcattacagaggcaaaacgaacttcgttcttcaagaaatcctggaaaccttcccatttcggttctttagagtcaagcatgaatggattcttgccttcttcttccaaagcagggttgaaacgccataagtgccagtaaccgcattctacagccttagcctcttcagcctggctcttacccatacctgccttcaaaccgtggttgatacacggagcgtaagcgataaccaatgacggaccgggataagcttctgcttcacggatagctttcaaagtctgagcttggtcagcacccatagcaatctgggcaacatatacataaccgtaagtagtagcgatcataccaaggtctttcttacgtacacgcttacctgaagcggcaaacttagcgatagcacccagcggagtagccttagatgactgaccaccagtattagagtaaacttcagtatccaataccaaaatatttacatcttcgccggaagcaatcacatggtccaaaccaccgtaaccgatatcgtaagaagcaccgtcaccaccgataatccattggctcttcttaaccaaatagttcttgaattctgcaatggtagcgcagttcttacatttatctttagcagcttccaccattggaatgatcttttcggcagcggctttgctcttgtctgcatcgtccttaccatcaatccattcctggaatgcttctttgtattctgctggacaagtatcactggcgatagcatccttcatagcagcttcgatacgtgcacgaagtttcttgtcagccaaagtcatacccaaaccgaattcgcagaaatcttcgaacaatgagttagcccaagcaggaccttgacccttttcgttcttagtataaggagttgaaggaacagaaccagagtagatagaagaacatccggtagcgttagcaaccatttcacggtcaccgaataactgggaaatcagtttcacatatggagtttcaccacaacctgaacaagctccagagaattcgaacaacggagtagcgaactgagagttcttcacattggctttgatatctactaaatgttgtttgctcttcacgttcttagcgcagtattcccaattggctgcttgagacaactggctttccaaatgtttcattgtaagagccttgcctcccttcttcggattgcccggacaaacatcagcacagttaccacaacccagacagtcaagcacgtcaacctggatacggaatgtcattccgtcaaattgtttacctacagctttcaatgtctcgaagtttgcacccttttgttcttcagcgtcaagtacgaacggacggatagaagcatgaggacaaacatatgcacacttgttacactggatacagttttcagcattccattcaggtacgaatgcagctacaccacgtttttcgtattgagcagtaccttgttcccaagtaccgtcttcgatgcctttgaatgcagataccggcaacaagtcaccatcctgagcgttgataggacgaactacttcgttgatgaatgcagggtcattgttagcagcaggagcttcaacttccagattagcccaagccggatcaacagccaattgtttgtattcgccaccacggtctacggcagcatagttcttgttcaccacgtcttcgcccttcttgccataagacttaacgatgaatttcttcatctgttctacagccaagtcaacaggaataacgcctgtgatacggaagaatgctgattgcaggatggtattggtacggttgcccaaaccgatttcctgagcaatctgagttgcattgatatagtaaacagtaatgttgttttgtgcgaaatatttcttaaccttgttcggtaagttcttggccagttcttcaccttcccaaatagtgttcaacaagaaagaaccgttcttacgtaaaccacgagttacatcgtacatgtgcaaataagcttgtacgtggcaagctacgaagttcggagtatttactaaataagtagaacggataggagtatcgccgaaacggaggtgagagcaagtgaaaccaccagatttcttagagtcgtatgagaaataagcctgacagtgcttgtcggtgttgtcaccgataattttcactgagttcttgttagcacctacagtaccgtcagcacctaatccgtagaatttagcttcaaacataccttcgccgcctaatgcgatttcttcttcttgaggaagagaagtgaaagttacatcgtctacgatacccacagtgaagtggtttttcggcattggcagagccaaattcttgaatacagcgatgatttgagcaggagtagtgtctttagaacctaaaccgtaacgtccacctacgataaccggagcgttttctgttccatagaagcagtctttaacatccagatacaaaggttcgccgtttgctcccggttctttagtacggtcaagaactgcaatagtcttggcagtcttaggtacagcagccaagaaatgtttagcagagaacggacggtataaatgtacagaaaccaaacctactttttcacctttgctcatcaagtagtcgatagcttcgcgggcagcttctgtaacagaacccattgcgataattacgcgttcagcgtcttcagcaccatagtaatcgaacaaaccatgagggcggcctgtgattttgctgatttcgttcatgtattcttctacgatagccggaactgcttcatagaagttattgcaagattctctgtgctggaagaagtggtcggggttttcagccataccgcgtgcaacagggttgttaggattcaacgcgcgttgacggaattctgccaaagcctgttgatcaatcagacctgccagatcttcattctccagcatttcaattttttggatttcgtgagaagtacggaaaccatcgaagaagttgacgaatggcacgcgagatttgatagtagcaagatgagctacagcagccatatccataacttcttgtacagaaccttcgcacaacatggcgaaacctgtttggcggcaagacatgacgtcctgatggtcaccaaagatacacaatgcgtgtgaagccaatgtacgagccgatacgtggaatacgcaaggcaggaattcaccggcaattttgtacatgttagggatcatcagcaacagaccctgagatgcagtgtaagtggtagtcaacgcacctgcctgaagagaaccatgaacagcacctgctgcaccgccttctgactgcatttcttgtaccaaaactgtttcgccgaagatgtttttacgacctgcggcagcccattcgtctacgtattcagccatagtagacgacggagtgatgggatagatagcagctacttcagagaacatatacgagatatgtgctgctgcctggttaccatcacaagtgatgaattttttttgtttagtcatacaattactaattattaggtaataaaatctattctctatctcttaatataaaaagccgaaaagccataatgggatcatatttccgtgtcctaattccaatttgtgtagggcataatacacgtttggattatttttgaacttgcacccttctgcgcaaatacggaaatgcagtccgttgtctaccataaatgaagtgcctttatcgcctttatatagtttatggtccttatacagggtattcatgaaaaatgtatccagtacatcctgttcttcgacctttaccggataaatggagtacatcaggttggtgttgtgcatcatcagtttggaaggtttcttgggaaattcctctcccttgggataaaccatattgataagacgcgcatctgccagatacttaatgtaattcatcaccgtggcacgtgaagtttgaatctccgtggccagctggctgacgttcggagcaacgggtccgtccacagctagcaaatatagtaatttttttatctttgaaagatatttcagctcaatttgtttgataagaagtatatctacttctatcatcatattcatggtttttagcagattctccgaaaagttacgtttttccaggaagaatgggtagaaaccgtgatgcagatagtcttgaaaataatccaagggcttcacgttgcgcaggatggttttcgctatctgttcgtgattctccaaaatttcttgtaaggtataggcacggaaacaattgccgctttgcaaattcagatattcgcggaatgagaaacctctcagatagtataccttgacaatgccgctcagttctggattttcttctttcagtcgcatcacagatgatccggtgaatataatcttcagagtaggaaacatttcatagcaagcacgcaggtcgtggctccattcgggatacttaaacacttggtctatcaacaaaacttttcctcctcgttttacgaattctgcggcaaactccactaatgtatatttagagaagtaaaagttattcatgttgatgaacagacatgagtgatccgttccgaacttttcttttgcatattgcaggaggaaagtcgttttccctacgccacgagtacccttgataccgatcagtctgtcattccagtctatctcgtccatcaagtcccggcgaacaggagcatttgtatgttccaccagataactgtgtgttctgtaaaaggtttccatggttgcttttttatcggctgcaaatatagcaatactaattcaaattgcaaactggagatagcaaaatattatttttttttctactaaaagacggacaagagaaatggtttgtactctaaaacatttatctttgtgtccggaaatggaagcgctttatttattcaatccggaaaatgatatggcattagcttgtggtgatccttattatatggcacctgccagtgcacgacgaatggcggccgagctatccatgttgcctgcatggtatgcagaagagggaggaactgtgtggctggattctgctcagcgtatgaaaacaatggaaagacaatcttttttgccgctttcggtcaattgggttttagaattcgtacccatttataataaggtgattccttggggatggaatccgtctttggtgcgtcgtttgcaggaagctggatttcctgatacagcatatccttcagtagagcgtatgaagcgtatccgtcaaatatccggacgtcagacggctgtaaaagtgttacgccgcctatgtagacatataggtgggaatattcccatattgggggaggcttttgtattgtcgtcaatagaggaagtgaaggcttttgtgttgtctcattctcgtgctttgttaaaagcgccatggtctggtagtggaagagggatacaatatgtttcaggtagttttcccatccctctggaagggtggattcgacacatacttaccactcagcatgaggtgataggagaacctttttatgataagcttttggattttgccatggagttttttgcagacgagtggggacaggtacattttatagggtattccttatttgaaacggataagagaggtgtttataaagaaaacttgttggcggcggatcgggttattgaagcgaggatatccacttatgtttctgcggaaatcttacatcaggttgggagggcgttacaggtagagttggcagaggtgataaaagggagttacgaaggctatctgggggtggatatgatgatatgccgtacccaaaatagcgggtatgccattcatccgtgtgtggaaataaatcttcgtatgaatatgggagtggtagcacgcttgatatatgataactatgtgtgtgatggcgtgcagggacggtatgttatagaatattatgcaaagcctggtgaggcatggcattctcatcttgcgcttcaagaaaagtatcctttatatctggagaatggaaaagtgaagtcgggttatttgtcacttacaccggtagagaacaatacgtcctatcaggcatatatcttaatttgattttccggataaaggaagatacagaaaagaggggatggttaccatccaccccctaatgctttatacaattttactaatgtaatctgtttgtctcttattgcattgcttaatcctatttgtgcgtcgaaatagctacgttgtgcatccaatacatctagatagcctattactccattgatgtattgcaattgggccagttccattgttgctttagaggaacgttccagttgcaggcgcgattcgtagatatcttttatcttattgaagtccacaatggcattgcgggcctctttgaatgcagtcagcactgatttttcatagctgtagcattcctgttcgtatgcggcctttttggcctgtagggttgctctgtattttcccatggcgaagagaggagttagaagattgccactgatataatgaatgggcgatttgaagaaatcagagaattcttcactttctacgccatattgtgctgtgaggctaagtcgtgggaacatattggtataggcaatacctacactggcattggctgctattaatttctgttctgcttcacgtacatcgggacgacgttccagcagagtggagggtagacctactggtaatgtttcaggtagttttacttcttcgggtagaatggaacgctgtatgcggtgcgggtattcacctgctaaaaatgcaatatcattttctttcaatgaaattttcctttctagttcaggaactaaagttgcggtacgtgcatactccacttgtgcctgttgataagaagtttctgaagttagtcctccttcaaaacgaagttttgccaagcgtactccttctttacgggcatagagtgtttgacgaacaatgttcagctcattgtctaatgcgaccaattcaaaataggcttgtgccacttcggacacaatactcattttcaaggcacgttgcgcctcgatgcttcccaggaattgtgctatgcttttgtcttttgcccaacgcaggttaccccataggtctaattcccaagttacggtaagtttaccacccagttcggggtcatttttatagttgttaccaccataattacttccttctttttgagcataagcgcctccgttcagttgggggaaaaggttggcaaagtctatgcgcttcattgcggcaagttcttttacacgtgccgcagcaattttcatgtctttgttgttatccaacgttttttctatcaagctttgcaaggttgtgtccgtatagatttcccaccactgcatatcggcaatagataatgtatcctgttgtcgtagcgtatctaattgttggggcagatgcaagtcgggacgtgtgtagtgcttacctaattggcaagaagtcagcaaagtcattcctgatacggctatatataataatgtatgtttcatcatttctttcgtctttttatatccttatttttgtttcattttcgctttcatcttgtatatcagtacaaagaagaaaggtactaacaaaattcccacagttacagcaaagatcattccgaagaatacacctgtaccaatagcttgacggctggctgaacctggcccgctggcgataaccataggtaacatacctaagatgaatgccaatgaagtcatcaaaataggtcgaaagcggagttgtgaagcgtggagtgcagcttgtaccacatctattcctctgtccacttgttctttggcaaactctacaataagaattgcatttttggcggccagtcctaccaacatcaccaatccgatctggaaatagacatcattctccaacccacagccccatacacctagataggcacctaatgcggctacaggtaaagagagtaatactgcaaccggtaccatccagctttcgtataaggcagcaaggaacaaaaacacgaacatgaacactaatgccagcaccataccggtctgtccacctgcttgtttttcctggaaagatagtccgctccattctacaccgatattttctggtaggtgttcgcgagctatttgttcgataatttccatggcctgtcctgaactgtaaccatctgcggcctcaccgcgaatcacagaactgttgaacatattaaaacgtttgatgctgcccggacctgtggtatacgaagtggtacccaacgaggtgagcggtatcatggcattgtctgtaccccgtacaaaaaataggttgatattctccttatgttcccggtagggtgcttctgcttgaatatatacacggtagatacgattaaacatattgaaatcgtttacatataccgaacctgtataagctttcatggtcgagaatacatctgctaaaggtactcctgcgaattttactttgtcacggtctacatcgaaataaagttgggggatgtccgcttgtaaagccgaggataaacctgataattccttacgttttgatgcataatacatcaatgtatccgtagcttgtaccaaattttcaaaagtggcatctccacgtgcttccagttgcatctcgaaaccacccgaactgcccaatcccggaataacgggaggggtggaaagatataccttgcattcggggtattgcgacatgtctttttttacctgtgccataatatcgtcaatagtttgcgagtcacgttcctcccaaggttttaagatgatagtcagttcacttcgtgcctgactggtccctacacgcggactgcttcctgccacgctttgtacatattccactgccggattttccatcaggtattccacagcacgttccgtcacgatacgtgtacgttccaacgttgcaccttcgggcagttccaactctattttaaaatatccttggtcttcgatggggaggaagctggtgggaataatgcgatggattaacaggatggcgatcaataccatgccgaatgtgctcagtacccgacgcgggtgtttcacaatgtgcttgatgagtcctacatatttatgattgccgatagccagccacttattgatacggcggaatatgatattctttttcttgttcggatcttccggtttcagaataagtgaacacatgactggactcagtgtcaaagctactaccgtagacagtaatacagatactacgatggttaccgtaaactggcgataaagttgtccggtaattccacctagaaaacttacgggaacaaatactgctgccagtaccaaagaagtggcgataatggctcctgtaagtccttccatagctttcttggtagcttggtagggagatagtttctcctcttccatgatacgctccacattctctactaccacgatagcatcgtccaccacaataccgatggcaagtaccaatcccaacagggtcaggatattaagcgagaatccgaaaatcaacataaatccaaaagttccaatcagtgagataggtacggcaactagtgggataactgttgcacgccagctttggagtgaaaggtatactacgatgataaccagtatcagggcttcaaacagtgttttgtacacttcatgaatggattccgaaatatacgtagtcatatcgaaaggtatctcgtaactcattccttcgggaaaattcttgctgatttcctccatagcttctttcacgctttttgctacttccatagcgttggctcctggtaacatatagatggccaataccgctgcattttctttgttgatggcactctcggtattgtatgattgtgcttcgagtgagatgcgggccacatcacgtaaacggatgatggaaccatcggcattagcacggactacgatttcctcaaactggcttacggtagatagacgtccctgagtagtgatgggaatggttacgtctaatccttgtacgggttgttgtcccagtacaccggctgctgattctcgattttggtcttttagtgcattctgcaagtcggctacagtcagaccgaaattggccagtttgtcgggttgtacccagatttgcatggcataatatcggcttccgatgtttgaaacacgtcctacgccagggatacggcggattaggtccagcacattcagagtggcaaagttgctaaggtatatttcatcgaacttcgggtcggtagaggtaaggcatagggtcagcaattgactggcagcctgtttctctaccgaaataccattttgtataacttctgctgggaggcgtgattctgctaacttgatacggttctgtatttccactgccgctagatcgggatctgccgagatatcaaaagtgacggtggctgaaaaacctcccgaattggaactatttgattccatgtaaagcattcctggggtaccgttcaattcctgctctataggagtggctacagcctgtgatactgtcagggcactggcacccggataggatgcgctgattttcactaccggcggagtaatctgcggatattggtcaatgggtagcatcgtgagaccgatgataccgacaatgactattaatatggagatgacagctgaaaataccggtctgtctataaagaaactaactttcataatgtctattgtttttttgaatgcgtaaattttcctccataggggaattcgtattcgggagtgaaattatccgatcgtatcttcttcctccgtttttttgtcctctacggcaggacttactttcactttcatgcctggattcagcttgtggtatccttctatgacaatgtcttctccgggggccaagcctctttccaccactacttgattttggaattcaggacctaattcaatgaaacgtctctctactgtagaatctttgcgcattacataaatataggcgccgcctttttctatgataacggactttaacgggactaccgtagcactctctctgacatccaataatagttttactttggtgaactgcccaggaagtaatacccgttctggattcggcatttcggcacgtacggagaatgtacctgtgcgtggatcaacttgcggttcggcaaagtctactagtcctttgtatggataaatagtattatctgccaaagtaatggatacattgggttgccaggagcgggtggagtctttttgacctaagttcacattacgttctttacttttcagatagtctagagcagtcatgctgaaatccactaatacagtatcactttttactacggtagcaagcaatgatttgccacccggaccgactaatgttcctaaatctacgtgacgttcactgatatgccctgctaatggagaacgaactatagtataacctagttccagttctgcttgatcaagatcggcactactcatcgctaccgacgcttctgctgtttcatatgcagcagtagcattgtccaagtccaactggctggcagcattttgttcatatagcggacggatacgttctaagtcgcgttttgctttttgtgcttgtgcctcatcctttttcaattgggcgcgcgctttgtcagctttggcccgatattgatcttgattgataacaaacaacacttgatttttagtgacatatgtaccttctgcgaaaagcatttgttctaaatatccctctactcgggcacgtacttcaacgaattgctgtgcacgtacgcgtcctacatattcaccatatatttccacatcgtcttgcgttgctggtgctatggcaactactggaagttccggcatctttgccggttgatgggaaacaatcaggtaaatcccgataactagtccaatacctattactacaagcgctgttcttttcttttttagcgcaatttctttgtgtgtaaaaaatagtttcatactttagttttgttattgtttaagatgccatcagtagaaatacaagcagcgtgccaaactattgtaaatagtctttcctattcataatcagtgctttatttctgtcttttgttgatagggaaagtgtggaaaataggcaacagctgtagaataattccacagtaggcgtaattaaatttagtagaggattatcgatttggatgcaaaaatagtaaaatagtgggtaatcttaaaatatttattcactattcattataatgaggaagatgttatagtgttagcagatatgtatgcaatttaaattttgcttgagatcgtcgtatctgcaaccttattgttttgaaaacacgccccctttcattttgaaaagggttgtgtttttcttttttatgactgaatatggtatctgtttgtttatcaggagattataatctgctttttcattttggcatagtattcgctatatacttgtcaaatataaaaggtataaaaagatgggagaattttataatccagataaattatataaaggtggaagccgaaataatagcttgataaataaaaaaatgatattccgtgtattgggagtattactttttattgaatctgctatgtttctgctttgtgcggctatttccttatgttacggcgagcaagattatcaatattttctatataccattcttttgaatacattagtcggtggagttttgctaatttgtagtagaggtgctgagaatcgactaacacgacgagatgggtactgtattgtaacttttacttggtttttgtttacgttgtttggaatgctacctttttattttagtggaggaatcccttcagtgacagatgctttttttgaaaccatgtcgggttttactactacaggagctactatattagatgatatagaatctctttcacatggcctgttattttggcgtagcctgacacaatggataggtggcttgggtattgttttttttactattgctgtgcttcctattttcgggggaggaactatacaacttttttcagctgaggctatcggagtgacgcacgacaaaacacatcctcggattgatgtgatggctaagtggctgtggatgatatatgctatccttacagttgtagaaactatgctgctgatgataggaggaatgagtttttttgacgcggtatgtcattcattctctacaacggctacaggtggttattctactaaacaagccagtgtggcttattggaattctccgtttatagaatatgtaatagcgatatttatgattctttcgggtattaatttctctctctattttatgtgcctgaaagggaagggcaagcgtctatttcaggatgatgaattccgttggtttatgaaatcagtaagtattctgacgcttgttatcacgcttgccttagtttttcagaatcattatgattgggaaaaggcattccgcagggctctgttccaagtggctacggcacatacgtcatgcggttttgcaacggatgattataacttgtggccatcttttacatggatgcttcttatttttgctatgttgtcgggtggatgtacggggtctactagtgggggaatcaaaaacatgcgccttatgattctggcgcgtaatatcaagaatgaattcaaacggatgctgcatcctagggctgtattgcctgttcgtgtgaaccgtcaggttatatcgccttccattattgcttcggtgaatacattctttgtattttatttgttttgtgctttggtcggatggacactactgatgtttttcggggtggggctgactgaggcgatgagtacggttatttctagcttaggcaatgtaggaccggggttaggggcattcggtcctgctttttcgtgggcggcgttgcccgatgctgctaaatgggtattgtcgttccttatgttgatagggcgtttggaattgtttgctgtgttgttgcttttctattcaggattttgggaaagatgatagttctccgagaaaaattgatatgtatcatttaattaatgggtattcgttgaaatgaagttctagaatatgtatttttacaaaggatggtatatatttgtgctcgaatttacaatacattcatgttatggcaacttcgagagagatgacttcgggacgtccgttccctttgatattgaattttgcttttcctttattgctgggtaatttacttcagcagacttattccttgatggatgctgctattgtgggtaagtttcttggaattaatgctttggcttctgtaggagctagcacttcggtggtgtttttgatattaggcttttgcaatggctgttgtggtggtttcggtattcctgttgcacagaagtttggagcaagggattatggtatgatgcggcgttttgtggcagttagtttacaattggcagcggtgatgtctgtggtaattgctattgtgactagtatgttttgttcggatattcttcagatgatgcagaccccggagaacatccttgaagatgcttatttttatttgctgattactttcatcggggtgccctgtacctttttctataatttgctttcaagtattattcgtgcattgggtgatagcaagactccgttttggtttttgcttttttctacgatattgaatattttgcttgatcttttttgtatttttgtacttgattggggagttgcgggagcggctttagctacggtattctcacaaggtgtttcggcagtgttgtgttatttgtatatgatgcgtcactttgagattctgaaggggacttcggcagaacataaatttcgaggagcgttggcaaagactttattgtatataggtgtgccgatgggattgcagttctctattactgctatcggcagtattatgttgcaaagtgcgaataatgcgttgggtactgcttgtgtggctgcttttacggctgctatgcgtattaagatgttttgtatgtgtccacttgagagtctgggtatagctatggctacttatagtggacagaattacggtgcaggaaagccgaagcgtatctggcagggaatcaaggcgagtgtattgatgatgactatttatagtgcttttatgtttggagtcttgatgttgggagcgcgtacttttgccttgttatttgttgaccctgtggaatgggagattctgaaggatacggaactgtttttgcatatttccgtttctttttttccggttttgggtttactttgtatcttgcgttattccattcagggggcgggctttaccaatttggctatgttgtcgggggtatccgaaatgattgcccgtataatggttagtctttatgcggtaccagcattgggctatttagctgtttgttttggtgaccctacggcatggatatttgcagtaatttttttgattcccgcatttatatatgtgtatggaagaataaaacggatgccacctcaggaatggtaaaatactaatttagtgtgtgaggtgctgaaaatatttttttcggcacctacagataaattttctgagcaataactatcagaaattacttttcttttctacaaaaattatttttttagttataggatgaacaaactctaaactttcagcatgtaaataaagcctgtctgcttttcgtccgtaaagttcatctcctcgtataggacaatgtaatccttccggatgggcggcatgtactcttaattgatgtgtccgtcctgttaatggataaaaggcaataagtgttcttccttcttgttcgtttaaaacccgatacagtgtgatagcggtttttccatgttcatgatctactatttgtctgggcctgtcaagaggattcatacggagggggagtgttatagtcccttctttagagggaatcttgccatccaataaggcaatatatcgcttttttatcattctattcttgaattgtgcttgcagatgctgatgtacttttttgttttttgctatcaataacacaccggaagtcgccatgtccaatcggtggactatcagaggacctgtggcatctggataaagtgtctttatatgttgatagacagagtcgatttctccttttcctggaaccgagagcattcctgctggtttgttgactacgactaggtaattatcttcatatactatctctaatggtatttcatgataatgttttttcaacaaggggttttcttccacttccagtccttgtaacatatgtttcaagataggttcgcatttccctttacatgctggatagtagtatccatgatgtcttatttctgcttttggagaatctccccaccagaattctgccatggcaataggttttaattgatgcttataggcatactggagtaatttgggagcagcacattcaccggctccggctggaggaaatttttgtatagtttgtgcaaaaatacgacataaatcttttgtttctccacgggcgtttagtatctgaaactgctcaaatagttttcgttgcaaagtggcagaacgtttttttctttctatcttcattgtttctatttttgtgatgaaagtatcggcctctgcttgtagtgaagcgattttttctttccacattttttccatgcgttttaattcagctttttgaaactggctttcgcgtatcattgcagctaattcctttgcgtcgggaactcccgtcttacgccggatttctctgttttttttagcggatttgaaaaattctttagcttctgtcaattcctgctgggactgcattgtttctttttcaatttgtcggagcaaatctatgtaatggggatcgttctgtgtctttttaatgcgtacattgatggcagatatatgttcttcctctattttgaagaatccttgtggttgtaacaaatcataaattggtgggacgaagaaaggatgatggcttttactagccaatgttcctgaaaatgcggccaaataacctattttattctcgggtgtttgtacaattaggacgccaaacatttttccttgttgcaattctttttgccattgggattgacttgccagataggcttgtacttctttagtcgctattatgcaaagtggatgaggggtatagtgaaaaggataagtgaacttatcgggtaactttatagcggcaatggaattcttaaaaaaatgtatcataattcgtttaatatagttgataatgattcgttcttcttgtgaggttattatgcgggcaagtcggaatggataataaagtttttgtttaattcctgtaatacttcagttaactgtttttcagcctgtaacgggaatatagatatacgatttaagattaggatgatatcacgttgaaaattgcggagttctattatttttataagcgtttctttctctctttttaccatataattcccttctattttgttcgtgtctacattgctttctattttgaaaccgctagttgtttttatgacggttatttgtggctcttcttttcgaattgtgatttgtctttcaggattttcgtccgaaaataccaaaggatatcctaccagctgcataataggcttggcgccactgaagcgcatacggcttttttcttcccaatcattagaaagttttttaatacataaagttaatgcgtgatctgtttcattcatctcggacataccttgctgaaaagtagtgagtgaaatgatacgtcctttactccatacaatgccgtcctttgatttttgtaagtatggattgatgttgttgtgtcggtctatacggtaaataatccggctttgtgattcggaactttcttttttttctttgtttttgggtgagagttctttggatttatctaagagtaatgcaagaactctttcccattcattcattttttgaaagggagggagtaaagggggaaagcctatttcttgaatcagacagtctgctttgccaatgtaaggagagaaatctagagagcattccaattgtaataacttaagatgatcggcgtcaatgaactgctgtatttcatcattacttatgtttagttttatttttttctgaagttgataatgatgtgttataagcataatcagaactttgactaatggtgaaaatttgtcgtaattatagagaatatgttctatggctgattccattttttcatttaaagcataaagggcaagtagttgggcaggcatcatttctgatggaagataatctctcataaataagtttcgcaatgttttttttgactcgatggtggagtcgtttagtaaggcaatggtatagaagagattgagcaatgcgttgtcaaaggttttagtattcattcctttcaatgattgagaatagagatcaagagctttgctgagatcgcctctatattggtgataaatagcatggtaatacataccttcgggcatatcagtagaaattttttggggaatttcgttgatgtgtccgggtaggatatattggtaaaatgcaaattccaatttatatttttctcggattgtcggttctattttttcattttcaaagtatccgtttatcatacaggttatgttgggatgaagcaaccctgatgcccatatatatttgtattcgtgaaaaagagtgtcgatgatgtatatgggaatattttgaaaaaaaggcatccattcgggaaaggttggcatatgcattaatatgtagcgtaacggttcgaaatcagcgtaagaagggagttgactttttaaattttttcctagtacataatcctgaatgatgataacccactcttcttttctccagttatttgagggagaaagccgggaagagatgaggaaagctggtttttgaggacttttcttcatatctataagaagttgcagctggatgtcagccttcaacatatagtgtatgtctcgtggcccttctgctgttaaagggaatattttgttttcatcttctagttctttcaaaatactttctatttcttccggagagaaattgaatattcggcttatttcacggatttcatggtagagggcaaaaggtttgattttccatgatagatatttcattatttgttctttgtgatcagattttgtaatataatctttttttctgtctaattttatttccatagctacacttttattttgcggttttatattcttgggcaaagataggtattttcttgccaataatctttttatgttgtgcaaattcactatggatgctatacaactgattttttttctatttttgtcgatgatttataagaaaaattgggtgttggtttgttattttggataaaaaaagaaagtaggcatgagaaaattgttgtgtccgcaatgcaaaattgcagggttatacgttaaaaatgagaggaaagaaaggttgttagtttatgtatcggatgaaggagaagtggtaccgagaaatttggaagagaatatggaagggtttgatttaactattgtctattgtttggggtgttcgtggagtggctctccaaaaagactggtgaggaggtaggtatggaaggaaaacttaaaatttcatttattggtgatagtcacattgcttattggccgtttgagtcttattttcccaaatgggaatgttacaattatggtgttccggggaaagggctggattatgtggagatgtttcataaggatgtttcggatagttatgtggttgttcaattggggactaatgatatttataatctgaatacagaaaatatggatgtttatgtggagaggtatgtgaaggcggttggtgctatttcttctcgtggtacttatttattctgtatctttccgcgtaatgattttatggatggcacagcagtgaactgttttatagctttgttaaatggaaaaattagagagaagataaaggaagaaactaatgttgtatatttagatgtgttcgacaaattgttattgaatgataaattgaatcctgatttgaccattgatgatttgcacctgaatggagctggatatcggatattagtttataccttgagagatctttttttgacagatagataaagagagtatttttatgttagtagggatgaatgaaaataatcattgaatctaaatatagaaatagcgatgaatattttattagtgagtaataatgacatgtgtcgtagtcgtatggcacagaagatattatcttcttttggacatggtataaggatatttacatctggagttctgccgggaagagtgataccatcttcagtggtaggggtgatggaacagaatggatacgactgttctcgtaagaaagctagtgatgtggatatatattgtcatcagccatgggattatgtgattactctctgtgaagaagcgaaggaagtggagggtgattttaataaggaagtgaaaaactggaagcatttttctttcgatgacccgtttcagcatgtttatggggatgaaaccgaattggaatatcgtatttccgaactttatgaaacgatgtattgtgaattatatgagttttatcgggatgaactgagtgagcaattattgccacgttgtacttgtggggctaatacctattgtcgatgtgagtgaaccagtagtgtcccatagatgtttgggcatattgacgcatccattgggcttgaaggtgatcccttctttttccaataattctttttgtttttgccagccgggaactagtcttccttggctgtttactacccgatggcaaggaagatgttgttcttctggtgcatgagataaagcttgtcctaccattcgtgaacattggggcttgcctataagctgtgctatttttccgtaagtagaaacattgccgtaggggatttcttttataatgctatatacttctttataaaattgtgctctgtccattctgtttatttatgaatgaaatgcttgatagttgttatgggatgaaaaaaaatcattcgcggaccagcatatcgcattacttctcgcattcgtttcttcatttctggtttataacaatgtatgggacagttgcggcaagtctttttttgttcaccgaatgtacaatgctctaatctgttatgtgcataatgcaataactgctgacaggttgggcaaagctctttattgccttccttgtaccgacaataaattcggatcatttgttctgcggtacgttgttctctttcaataattctcatctgtaatgaagtttttgtgtgaataaggtgcaaatataggactattttttcttatttttgtattcaattagtgtataacctttaaaacaaagaaataatggataaagttgttgttaattcgtacgaggattttgagaagctgctaggacggcagattggtatttccgactatgtggaagtgtcgcaagaccgaattaatctttttgcagatgctaccttggatcatcagtggattcatgtagatacagaacgtgctaaagtggaaagtccttatcatagcactattgtacatggttacctgactctttcgttgcttccacatatgtggaaccagattatagaagtgaataatctgaaaatgatgatcaactatggtatggacaagatgaaatttggacaggctgttctagcaggtcagagtattcgtatggtagcaagtcttcattctttacagaatctgcgtggcgtagccaaggctgaaattaaatttacaattgagataaaagaccaatcgaagaaagcacttgaaggcatcgctattttcctgtattatttcaattgattttttcaaataatgtctgaaggagagttaggtgtatttttatcgttcttggataaatgtttttacccaagaacgattgctttgttttgattttttttagacgcgtatatatccttttggagaagttaaggattaacaaaattaataatgaagcagaataggtatttaatgatcatctataaaatgaaaaacttattttaggttgtttttctctaaataataacacaaatgatcatatattttgccatcatagctcacttcggcttgatggagaatgccttcgtatgcaaaccccattttctccaaaacacgttgtgaacgtttgttttgaggataacaatttgcactgatcaaagttaatcctagtttgttgaagccatagtccaagacagcagaggcggcttcaaatatatatcctttttcccattgggcttcgtctagccaataacctatcattccggtatttgaattctctctcttagggtctggtagaattcctatagctcctatcagaagctggtcttcctttctagtgatggcccatgtgtttttttgtggtataaatattgtttgaagaattttcagagattcttccagcgtgtcatgaggcttccaaccagcattatttcctaggttgggattctggcaacagttaaaaacagcttctgtatcattctctgtaaaaggacgtaaaataagtcgctcagtttctattacatgatttctcacaggagggtattcctgcttttttttgtaaacacactctatccggtttccatctggatctagtaccacactttcaaaatagccatctcctgaaatgcgaggttcacctacgatatggtatcctttagtacgtagctgttccgttagtgataagatagcttcttggctttcaaaagaaaaagctagatgagtcaatcccaatctgttttcttctatcggaacattttgcacgtcaatcctactcatcaactctaatgtagcaccactttcaaatgaaatgaagtaagattcaaaacctttttgggaattaatgtatttttcattacttgttccgttaaagtaacgagtgtaaaattcccttaatttttccagatgaaatgtccaaatggcgatatgatgtattttcatgagtgattatttattcatccttaattccgcaacactattacaaatataactttttaagtacctgagcaacaaaaagttgctcaggaatttgccatgtcagatttttcacctatcttagtgttgcaaatcaaaatatgtatcaaacccgacagacatggcaaaggtagcaattaaatccgagaaactcactccttttggaggaatattttcaataatggagcaatttgactccagactctcatctgtaatcgactcaaccctcggtatgagatgcaggctgtatggttatcaatacagcgaaatcatccgttcgcttatgagcgtttatttttgtggcggctcatgcatcgaggatgtcaccactcatctgatgtaccacctttcgcttcatccgacacttcgcacatgcagtgccgacacgattcttagagccataaaggaactgacccaggataacatttcctacacatccgacactggcaagacctacgacttcaacacggcagacaagctgaatacactgctcctcaattgcctattgtccacagggcagctgaaagagggcgaggggtatgacgttgacttcgaccaccagttcatagaggctgagaagtttgatgcgaagcctacatacaagaagttccttggttatcgccctggcgtggcggttattggcaacttgattgtcggcattgagaacagcgacggcaacacaaatgtccgtttccaccagaaggacacgctgaagaggttctttgaaaggtttgaacaaaacaagcttattatcaaccgtttcagagctgattgcggctcgtgttctgaagagatagtggaagagattgctaaacactgcaagaccttctatatccgtgctaaccgatgcagttcgctctacaatgacatctttgccctcagaggttggaagaaagtggaattgggcggcattgagtttgagctggcctccattctcatcgagaaatggaaagggaaggcataccgtcttgtgattcaaagacagaagcggatagacggcgaactcgacctgtgggaaggagaatacacctaccgctgcatccttacaaatgactacgagtcttccgagaaagagattgtcgaattctataacctccgtggagggaaggaacgcatcttcgatgatatgaataacggattcggctggaacaggcttccaaaatcctttatgggagaaaacacggtgtttcttctgcttatggcactcatacgcaacttctataaattcatcatggcgaggcttgacgtgaagaggttcggactcaaagcaacaagccgcatcaagacgtttgtctttaagttcatctctgtgccagccaaatgggtcaggacatcaaggaagtatgtgctgaatatctattcatgcaacaatgcttatgccaatgtgttccagaatgactttggataacaccgacaacttatagtcgtgattttgcgtattgcctcaagtcgcatggtggggtaaggggcatttatatgtctttatggtgacattcgatgcactgtgccccctttttactaacgatgcagattcttttcgcttctgtatcatattaggcgcgtagttgcggatttgaggttcattatagatattttctttagttcgtttttattccaaataaatcatctttttggtcattccaccatcgatgatgatattttgtccattgatgaagtcattctcttcttgacataaaaataaacacatacgtgctatgtcttccggtttgcctactcgtcttgatggatgttgggcatgatcttctgggcgtagccgttcgtaatcattggtctgaatccatcccggcgaaatacagtttacggtgatatgaaagtcggcaagggataaagcaagtgcatgggtcagtgaatagattcctcctttggaagccgcatagctttcgcttcccggttcgctcattaaataacgggtggaacagatattgataattctgccatacgggtgattttctgcttgggatttgcgatgtaaagctaatgtgcgtgaggtgataaatacaggtcgcagattgatggacaaaattttatcaaaatcttccacgctggtttctgtgatgggagaaaattcgcttattccggcattgttgataatgatgtccatatccccccactttttaaaaagttcgtgcatacagttctcaagggattctttatctcttacatcggtatggtagaaaattgctccggtctctttggctgtctgtattcctaaatccttatttttgtcacaaaaggcgacttggtattgtgagttgcagaaagctttcacaatgtttttccctatgccatcggcacctcctgtgatgaatgcttttctaggaagtttgatcgtattgtctgtcaggtcctttggttgaagcttgacggaaatcgttttcttctttccttgtttacgttttttttcccatgcagcctttcgggcttcatattgttcgtattgtctttctatataattgtctgccataagttttgaaatatatttatcggaatgttattctattgtttaccataaaattaactgctccatatattattattccaataaattgtgctgtaaattctttgatccctattgcttctatcatcagtatcacaaaaagaagttgtatgccataggcaataccgaaagcggtacaaaagagcattatttgttgccaaagactgttttggggattgctggaaggaaaaatccaatatttgctccatataaaattatgggtttgagcgatgagatatgccataatatttgctactatatattttcctttgaatgagaagtaactcatcacaatccatatcactaacatggtaataagataatttaaggttcctattgtagcaaaacgaactaaacgtactgatgctttcatcctctttttattggtttgttttatatggtgaatttgggtgcaaaattactaaaaatatgtgattttaatgcttgtataataaaaaagaagcctacttctcttagtttctgttttaatgttgttcagtattttttcaaagaaaatttaaactggcttttttcagttttgttctgaatttgaagttcaattgtaatagaggtggacttttttagggaaagatgggaagaaatgttgaaaagcatggtggaaatccggagaaagtgttgatgcaaatatgttgattttatgataatcggacaatatataaggcacacttttatatcatgcaaaataatagtattttatagatgtaccttataaactgtccgattgtaaatattcaaaatctgtgattaatgaatttcgatgattctgttcactttggctttttcttcaggagtgcgtttaggcaaatcaatggtcagaacaccgttgctggcattggcgctgattttttccttaaccacatcttcaggaagaatcaaagcttgttcgaacttagagtaagaaaattcacgacgtaaatatcttctgttgtgatggtcgtcctcttttgtttcattctttttctccattgagatcactagttcgttgctttcgctgatgtggatattgaaatcttctttagtcatacccggagcagcaacctctactttataatctttgtcactttcaatgacattaattgcaggagcggtagcgtttgctcttgtcaaccattcattatcaaagaaatcgttgaaaatacttggtaaccaattctgattgttatactttctagtcggcatcataattataatctcctatattttaaattgttactagactgtttttgaatctttttatcttgtcgtttttagcaatacactgatgttcttgcaaagtatatgcctgatggcaaaatgtcagccggaaatgaaatgaatttaaatctgtgaagataattttaatgaatatcgagatgtgtttaaacctttgtaaaatttgtttgcagttgagaagcaaggcaaagtgataaagaaagccattttgtcagcaaatggcagctattatttatgtctgtatattatctttgcatcgttttataaagataaccattaaagaagaaaaggaaatcatgttggcatatacttatattaaacagggaaaatttgaattgatagagaaaccgaagcctgagttgagagactcgcgtgatgctattgtgcgcgtcactctcgggagtatttgtaccagtgacttacatattaaacatggtggtgtgccacgtgctgttcccggaataacagtggggcatgaaatggtgggtattgtggagcagacaggacgtgatgttaaattagtcaaaccgggcgatcgagttaccgtcaatgtggaaaccttttgtggagaatgttttttctgccggcatggatatgtgaataattgtgctgatcctaatgggggatgggccttgggatgtcggattgatggggggcagacggagtatgttcgcgtaccttatgctgatcaaggcttgaatctcattcccgattccgtgagtgatgagcaagctttgtttgtaggagatatccttgctacaggattttgggctgctcgcatttcggagattaccgaagaagacacggtgcttgtcattggtgcgggatctacgggaatctgtactttgctttgcgtgatgctgagaaagccgcagcgcattgttgtttgtgaacaatcttctgaaagaattcggtttgttagggaacattatccgcaggtagaagttgtcactccagaagaatgtaaggaatttgtattgcaaagtggtccacacggtggtgcggatgtagtttttgaagtggcaggaggggaggatacatttcgcttggcatgggaatgtgcgcgccctaatgctgtcgttattttggtggctctttatgaccgtcctcagattcttcctttgccggatatgtatggaaagaatctgatcttcaaaactggtggcgtagatggttgcgattgtgctgagatactccgcttgatagagatgggaaaaatagataccactccactaattacacatcgtttcccgctagatcagatagaaacggcttaccagatttttgagaaccgacaggatggagtgataaaagtagctgtggcaatggaggctggaatgtaaattaaaagcaatgaaatagtataatataagagtgtatgcctattattgaaatatcatcattgacacatcccggagtggatgttttctgcatgttgacggaagctcagttacgccagcgtatagaacttgggaaaggggtgtttatagccgaaagccccaatgtcattagtagggctttggatgcaggatatgaacctcttgctcttatgtgtgagcgtaagcatatctctggcagtgctgctcacattatcaagcgttgtggtgatgtgcccgtttatacgggtgatagagagttgttggctacgttgactggctatgttctgacacgtggtgtattatgtgctatgcgtcgtccggtgttgccctctatggaagagatctgccgggatacccggcggattgtagtcattgacggtgtggtagacactaccaatatcggggcgatattccgttcggcagctgctcttgggatagatgctgttttgttgacacgcaattcttgcgatccgttgaatcgccgtgcggtaagggtgtctatgggttcggtgttcttggttccatggacatggttggatggtacgattggcgatttgaacaagttaggtttccgtactgctgccatggcgttgactgatgattctatctctatagatcatcccatattggcggctgaacctcggttggctattgtgatgggaacagagggggaggggctttcttacaaaacaatcgctgaagctgattatgtagtccgtatccctatggcgcatggagtggattcgctcaatgtggctactgcagctgctgtagccttttggcaacttcggattacagactcttgaaaaagatttaatgtatgattaagtttgttttttgttttattgattgaatatacaaatcagagactctgtaaacaacggaaaatccgtaagtcaggcatatctgcccgatattttagaaacaataaagtaaacaaaagttatataggatataatgggatgcctattgtgggaaatacattttgcttgcgtttccctatctataaagaaagaggcagtaaaacaccagacctacccccccccccgatagatactgtataagctggtggatgaagaaagtcctgtaagtaagatttgcttttgcaatattattgtacttcgtcctcatgcgatgctttctaagggaagcgttgatgctgcacatcatgctgtacgtttattcaatacgttcccgaagcaattttacatcagttggaaaatgcatcaggctttcataacagttggcatctgtatagattgtcttaaaattctttatgtatgggttccagctattagtgggggcggtaatttagctgcatcaaagattcgtaatctggaatgtcccagttacggtctaaaagattatggatgcggtaaatttatcagaaaaatacatattccttgatcttcgttcatgggaaatcaacattgcgcggacagcccgtcgtcttggtgtgtcccgtaatacggtacgacatctccaatccctaagctccgaggaagtccttcagcaaaaagaacggcattacaagctccatgcctacgagcaggccgtcgcatcccttcttatcagtctcccctccatttccagcagtcgtattggcgactacttgcgggaacattatccggactttccgcacgtctgcgagaagaccgtccacaattatgtccagttcatccggaagaagcaccacattcctccggccagataattatcggcaccactcccccaaggagtgggagcccagtccgtcatatacataacccttaacagcaaacattatacattaattatatatgaatacccaaagctttacaaacggaacaagccgcctgtcacgggctgtacggcgactggaatgcgggacacatctttgctatgagctcagcacttcccaattttctgacatgaaagtcagaagactcacccaccaatacggttttttcggttacagcatctatcggtatctcgtgaacgagacactccacaacgggagttacctcctgctgtggtgcgaggaaacggcacagtactggaatgcctctttggaagatgtcacaagaattgtcaacggctgcatacaggtcggcctgttcaatgacgagcttttcaggaagcactggggcctgacttccgccgacatacagcgaactatatggaccatgtcaggtcctgtggcatgctctcccggtatcctggtatccccaaggagtccgaactttcggccagctgatgtattatccactttaaatataaagcttatgccaaaaacaactaaaaaggttttcacctattttaggttcgagaccgatcatttctatgatacgaaagtaaaaagactaaaaaataaatttggaatggaagactggggggtgttccatttcattgtaaacgagatctaccgtgtcgagggatgctacaactgtaatttgcaaattttcttgtgtctttttttagaaaagttaaatatgccactgaatacaccagtaactaaggctttacaagttcgtttctcgttcctgttgtagtcttaaaatagtctgcctgttttctaaccggtagctactgtcggtaaaacttgatgactttacatcgataaagcaatcggtcaagcagagcattggcaaggatttcatcatttaatgtttctacacattctgtaggtgccttgttggttgtaatgatgatggatgtcttctcatgcagtgtgtttataagattgaaaaaagctgtagcttcctttcttttcacaggaaacagcatgatatcatttattgccagcagctgtgcgcgcagaatcttgttataagtcatcatggccggagttgagatatctttaagcctgagactatttacgatatcctccattgtcatcaggtatgccttgtaaccggccttgaccgcatcaaagacaagaccggctgccagaaatgtctttccggttcctgatggtcctatcaggatcaagttataagtttcacggaaccataccagttcacgaagctccttcatctgccggcggtctatgccctcataaaaattgtagtcatattcgtcaagatcatgtttccggggcagacgtaccgcaacaagtcgtctctcgtagtctttcctctctttcatttcaacttcggtacctaataccagggacaggaattccgagtaggtcggtttttcttcctgtgcatgatgcagaatgctgtccatgcggtttgcaatgttataaagccgcagacgtctggcgtgttctttcaatttttcactttgtatcattcaaaaaacttgttatattggtttatatctgttttttcaggatgacagtccgctgtttccggaatggatgtcggagcttggatagtcatcccgtccatattgtccttgcttctgtggattgagccggatatttcctgcacggaaaggctgttgtatatgttcttttccagacaggtccgcagggctgctatcactgtttctttgccgtattcggatatcacatgaagcagcagtttcatattgtccctgtaatagcgcggcttttccctttccagattccggagccacagaataacggtggggtcatcttccgtccgctttcggatccggacctgcaagtcattcacactccatgtcttgtccttatgatgtcttttgtcacatacatttttcccttttccgggacacaactcatgcctgcatatgagtttgccgctctctttgtcgtacagttcgatatatccgttattctcaagaagccacacaacggtgttccggtttctataggtgctggagggtacactgtagtagttggtccggtaccgtaccgtattgtccttgcggacatgatactctttcggctcgtctttgggggggcaccggttctccatagtatggcaacagatatttccgttcaatctcaaattcctcagccggaactaggcgtgtggttccatgtatcttgccgtttcctgttttttccaaccattgcaggacctcggtgttaaggacttccagactgttaaatgtccgtccggcaagaaagttacgcttgacatatttgaccacattttccacttttcccttgctttccgggtcagcaggacggcagaatacgggctggaaatgctgctcgttgacaaaggcacggaacgttcttgtcaatatgaggtcacccaggttttctctgaccagcaggactttgtcctggtcatagattatccttctcggcttccctccgaaatatgcgaaagccagttcatgggcatatacggctagggctgatgtgaaaggcgtacaggaaaaatacacgaacttctgtttggaacggctcatcaccatgacaaaaaaataaactttgacaaagtcgtccctgtatgtgggcatgcggctttctccgaaatccatctgggcatattccccgtaaggggtatccggcattttctcataaacacgtttggaaaggccctccttgttcagattatacttacgacgtacagtttccacaaaattgtatacggttttcccgaagacaacaggaagatcaggatactgttccttcatccagtcatgaatctgggaggcggacaggaacctgtaccgggaaagaacgtcacagacataactttcgtatttgtcaagtatgcggggatatcgcctgcgatgctgcaattttgcagtcaatgtgtcctcatccattttcaagtaccggcgcaccgtacttctatgcagaccaagctggaacgcaatctgacttttgttaaatccttttaaatataattctcttattttgtaccacatgatgactctgttgtttgattggtgtctgtatgcgtccttagttctgttcatatcatttatattattgaaacgcaaatatagacatttttaggaggcatgatggcatatttcctttttctaaaaggacatggggcaaagatacggattacaactccatacctgtccgtattaatattttaattttaaaattgtttgatattttaaaattaaaatattctgatattaaaatgtcctgaattcaaacagacaatgcaacagtgtcgaattcattgttagttaataatttatatttttcctttggggtcatgtaacccaatctttttctcggtcttgagtttaagatgttttgaacgcgcattacctgttcattggttatgtccctaaagtccgtacccttcgggaagtattgcctaatcaaaccattgctgttttcattggctcctctttcccacgagtggtatggttttgcaaagtaaacaaaaatatttagtttacgtgcaatttcttcgtgaaaactaaattcttttccattatctgccgttattgtatgtatttggtctctaaaaggttccaaggcatcgatggcagctttagttagcgggctggcatctttcccgctaagtagtcttatccatactagtccagttaccctgtcgtttatagttaatagtgctcctttgtgattcattccaatgactgtgtcaatttccaaatcaccaaaacgtactttcttgtctactatcgtaggacgcttgtctatgtccacgcggtttttgataaaaccacgtccattagtcaatgcacctctcttcttatgacttcttccccgtcttcttaaatgcttgtataacaacttatctccatgctttttatcttcccaaatatactggtagattgtctcatgagaaactgtttccaagccctttgttcgcataaacccagtcacttgttctggactgaaatctttctttatgagtatatctacttgaattttcaagtcgtccgtaaacttcacgaagtgctttcgtgaacgcattctggacatatacttagcctgagcgagatccggtttgtaaatgccattacgtttatcactattacgacgtaattcacgacttatagtgctacgatgaactcctacaagattggcaatctcggttcttgactttccgctttgcagataagcggaaatgttatacctttgttcttcggttagctgtttcatattgcaactgaatgttggggaactggaagatgcaaagaaacaacttttccacaggggaacaaaagggaaagaaatcttctttctctgttcctctgaaaaattattcttttcgtatcttctcattgtcatcattctcactcctgttgcattatccgcttgaacttaggtgtttttaaattgaaccgtcagcattcttttgaaaaaaagaatatccattgattttccacataagatcaagtgtgggttacagaattaggtgtctgatatttttaatgataatataacatgtatgggtaaataaatatcataaaacaacacctgcatgacttcatgtacaggtatttatgactaaagttttaatatttcaacattttgatattttaatgttttaatattaaaacactttaatgtattgacattaagtattggatggatatattgaatggctatttttttttaaagtgacacggcaatttagaatgtatacctatcggattcgtggaaaaagaggaccattcaaaataatcctgcccgcttctttttgttccttcttgacgctaccaggcatgtccggttctccgccatcattttcagattaccaatatttttattcgttcatggacaggaatgttcatgcgcatttctatcggcaatctgatcattactggcggtatccgcttaatgaaagaatactgtcaggtattgttcattttctttttttcgggaagattatgcagaaacaggtgttgtacttttcttgattttcagaatcggtttgataaagtctgccgtattgtcttccggtttgtccaccggccacttgccgatagcttccgaaggaatctcttacaaaatggcaatgccagtgcctttccggatttctccgtgtctttcaagacctgaaatccggtgcacatccgtatctgccatataaccttgcagtttgttcctgtatagacataatatatatccgtttttctgtcacatattttttatattcatttcatttcgcatggtcttttctcttttcttgggaaagggctctgcccgagaaattccatttttttccttaaaaaataataaagaagagcaagcaggggtaagcgtcttcgcgattctatcttgtcgtccttttttcattcttatatttttgctatgtataaaaatgaagcattatggatttagcagcaaatcgatttggaaaaacttggaaacatttccttgaagtattgaaagtagactacaattgttctttagccgatgtttgccgcgatcagcataccacttttggtggtatgagttcctggatgtccagacggggctatagcgttaaacaagccaaggcagatgtagtccgtgattattatggcggcgttgccccctcccaaccgacaacttcctttccttcattcactcaaatagcacccgccatgttgtcggaagaagagtttagtcttgccgggatcacaatcacctttaacagtggaaccaccatttcgttcaaacgggccacacccagtggtgttattaaaatgttgcgcgattacgaaagaaaggagggagatccatgtattctctaacatcagccaatcgctactatctgtaccagggctttgttcgtatgaaccttggcattgacggtttattcaaaattatacgatcggaaatgaaggacttgtctcccgtttccggagatatctttttattctttggtaaaaaccgacaaagtgtaaaaatactgcgttgggatggcgatggctttcttctgtactacaagcgcctcgaaggtggaagttttgagttaccgacatttaaccccaacacaggtaattacgagatttcttatcaggttttgtcttttatcttaaatggagttcattaaagtctgtacggttgagaaaacgttttacgatctaatacaacattctgattattagttgtttgttctaaagatatcatccggtttatttggctaatttgttgattttttatatctttatgccatgaaaaaggatgagatcatagagttattgaaggaacaaatcaagggattacgagatgacaacaacagactcttggaccaaatagatgctttgataaaggaggtttcttcccttaaagaggcactccttcaaaaaggcgaatctcttagcaagcaacagcgccttactaagggactcgccaaacttgtatccaacacatccgaacagcaacaggctccccaatctgccatattcgaagaagagcggcagaagatagaagcggaaaaagcagataagcgtaaagcaagaaagaacaatggggccaaacgtgatatgcattatgagatggaggaagaagaacatgtcgtttatcccgatgatcccgattttgacatcaataaggcccggttgtttaccactgttcccaggatatgcgtccgctatgaatgtatacccatgcgcttcatcaagcatgtctacaagatacacacctataggcaagaaggtcgcctgtttgagggaaaaacaccggcttcggccttcttgaattccagctatgacggttcatttattgccggattgatggaattacgttatatacaatcgctacctgttgaaagaatcatcaactacttcgagggttatggttttacgctgaagaaacctacggctcataagttgatagaaaaagcctcaagcctcttcgaaaatctttataagtgcatccggcagacagctttgagtgatccttataaggcagccgatgaaacctattacaaaatactcgtcccggaaaagaacagtaagggaaaaggagtccgcaagggatacctctgggtggttgtgggtataaacaccgggatgatatatctgctctacgatgacggttcccgctctgaaagagttattcttaacgaattaggcagttgcaagggcatcataaaagtgacggctactcaccttaccggaaactcgaaagcgatgcttatccccatatcacacgcatcccgtgcctgcaacatataaaacggaaatttatagatagcggtgagaacgacccggatgtaaaaagaagcgtggaactgataaacaaactttatcaaaacgagcataagcataaagtcggggtggacggatggacggcggaacagcatcttgcacaccgcaaaaagtatgctctggacatactcggggaaataaaagatgtgcttgatgaaatagaagaacggggggacttgttacccaagagcgaactaagggaagccattacctatcttcgcaatgagtggaatgctgtagtggacatcttcaactatggtgacactttcctggacaacaatatagttgaacggatgaactggtacatattcctgtcaagaaaaaactcattgttcttcggcagccataagggtgccgaacggggcgccatactctacacgatagcactcacttgcaggatgcataaagtaaatctgtttaagtatctcacggatgtgataaacagaaccgcagaatggcaaccgaacacgccactggaaaaatatagggaactcctgcctgacaaatgagaaaaggagaatagctaaacaaggcttattaaactttttattctaccacactatatagaaccgcggagacgcttacatagtgattgacaaggtatgggattacatcaaccagcctgccagcaattcgcttctgcattacaatgacggctcttatatattcgatataccatctttcaacaagggggcaatcagagaggcgatattgaatgcttgttgccaccgcttaatgttgattcagagcgatgttgtcatcaagcaatatcccgatagtataaccattaccaatgctggtggttttccgtccggagtggatatgaacaacattttgacagtgaacagcgttccgcgcagtaaactgatgagcgagatattgcagaagacaggattggtggagcgttccggtcagggagtggataaactgtattactgtgacgtgctaagttgtgtatgtgattgttttactgactattacaaaaaaaagtaataatctgattgaacctgctgtttcgtcagcagtagcctacggcaggtgcataaccagtaatggtcttgtactaagctgctcggacaataaagcccttccgaaaggagaagtttgaaccgtgaggggaaagcaactgctattagtgtcatatagtaggggagctaggctggatggtatgaataacaaatgtgaactgttgcttaaacatcgtgattgtagaaaagccaaagactactgacaggctttaccaaaaggtatgcagtcggttaatcctttgccgagcaactgaatgtctttgaattgctggctttgtacaaaatggcaatgagggattgcgaggggcttgatgaaaagattttatgaaaattgtcggaagaaaaccttatcggttacgaaaactgctctcatcgcttgtccgaggagtatcggaatgagtctgctgaaagattgaaaggaatgaatatgaattacctcaagttggtttcaggctgttttcataaaaatggttatataaatcgttcttttctcaaaaaggtatttcaagacatgttgtccgaaaaataaattagaggcttgatttcaaagatgaaaaatgcagggattatacagaaagatggtgcgggcaaatatacccgttatgtaaaagcaccggattttccatcgtttgtctagggccgcaagaatcaattttagggccgtaagatttcaactgtctgtttatcagcttatttgattagggaaacaaggggcttgataaggcaaagattcagcaaatgataatacaatatttgcagaatgcaggttcctcaggagcaaagcgtgatgccatttttgaatatttgaaagaggtattaccccagaataagacccaagagcaacaagagcgtatgattggcaatattctttctgagatgaaagagattggattgattcatcccgaaggtcggacatggtttttggggtcgtaattcatcaattatagctgaaatatgactatttataactgtcaaatgagattataacttaaaagtagtcaaatccttggtttaatcaagaaattggctacttttatatcagagttgtttgacaaagcataatgcagaagattagtgcaacaccgctgtcgccaaatcgttaccaacaactttctaccatagtatttgctatttgtgtatcaatcagatacggaataattgattatccgttgcaatgataaacaatttttgcgaacgagagattataagtcataagataatgtttgtatagcccacttatatacaactctaccgttttgatgcagtttgttattggaaataacttcttcatcattgatagaatttttttgactggttagatagaggtcttttccaaattctccattcgtttctgttattgtttccaataatcttgctgtccactaaaaatgtggataatattgaaaagttccacaataaaataaagttggttcagaaccagcaagtccatgacaatattgtaggtaccaaccagtaggaattctaagattaatatttcaatagaatgttatttgtttttataatagaatatcatctgtcgtaatttccgttccgaatattttttaatgtatatatctgtttatcagtgttataaaaattgaatatgttcgagactgagaaataaaaaatattattcagacatcaaatatttatgattttgacagattttatagagaaaatctcaaaaatacatcgggggacataattttgtcccccgatgccactataggggacaaactggggacaaaaatgtggaaaacataagctaaaaagagaaaatatggttctcaaaacagtttattttatatctatataagttattttctatcagaaaattacaagttgctattatataaccatatgattattaatacgttaatccactcaccaatgcaatatgtattataaaatcgtaacatattgataatcagatatgcatttggaggtttttcatactgggggacaaacgggggacaaaaaaatagagacaatctgcaaagaaaacactaatacattttcatttttgaaatacgtggttaaggagcctgtcaaatctcctttgtccctcgtgtctctcatgatttgaagcggtgtatttgctctttgtacctcttttctttcgtcacctcttatgtatagaagtttagtcttgtttattgtatatctatcaaaattctaaaccaaactatttgcctaccaaaagatacagagccttttctttttttggcaggcaatacttcgaagattatgaatgttgcgtatgactatatctatttcttaagatagcttgatagtaatattctgaatagaaaaagaagtattatttcttttattgttcaaataattgctatatttgcagtatggatagaaaattaagtgaaataggaaccattccagtaacgacttcaatcattgaatcgttatatccggaacttaaatctgctaataagaaagtaacctggctcgaaaaacaaggggttatcatcagattgaagcgaggactttatgtgatcaaccccgagtattctggaaaggctctatcaagtgagttgatagccaatcatctctatacaccttcatatatttcaatgtctactgcactacgatattatggacttatccccgaggctgtatatgttcatcaatcgatgacagtaaaacatccccgaagctttcaaactccagtcggcagttatgactacaaatatatttcaagaaaggcattttcgataggagtaagaagtatgaataaaggtgactatgcatttcttattgcatcaccggaaaaggctttgtgcgatttgattgccaattcctcaaaagtcattcttcgttatatgaaggatgtagagatatattttgagcaggatattcgtatggatatggatgagttctataagatggatgcaaccatatttgaagattatattcatgtgggtaaaaaggctgattcaatttcgacacttttaaaattcttaaggcgatgaaaaatgaaatattcgacaatatgctctccctttatgatttaacaacggagcaacataagagaaacgccatatttgaagttaaccaacaaatgatacttgcaggcctgtatgctggaggcttctttgagtcagctgcgttctatggcggaacttgcttgagaatctttcatggcttgcagcgtttcagtgaggatatggatttctcactgcttatgcaagatgataagttcaattttacgaaatatttccctgctatcattgacgcctttacaatggtaggtcgtgaggttgaaataaagaaaaaagataagaagaatttcggaaaagtcgaatcggcatttcttaaagataataccgatgtgtatgatgtgactttccaaacagaaaagtcaataaagataaagattgaagtagatacttgtccaccgttgaacttcaagacggaacaaaagctattgcttcagccacattcatttatgtcccgttgttttacacttccagacttgtttgcaggcaagatgcacgcactggtctatcgtgtgtggaagaatagagtcaaaggtcgtgattggtacgattttgaatggtatgtacgccataatgttccgttagattttactcatttggcagaacgatgcaagcagtttaacaatgaggatattactccagagttattcaaagagaaactcattgagcgtctctctacagctgatataaaacaagtgaaagaagatgtattgcctttcgtacgcaatccaaaggaacttgatatttggtcaaatgattattttgtacagttggcagggatggtaagaatgggataatgttgggtgaaatagagggggtatgaagtggaaagaaccttttctatcacacaatccaagggtattacgaatatgaaaaaaataacaaagaactaaataacaacgacaattatggttaattggctgcatatatctgatttgcatttagggagtggaggtaccataacgaacataatgcgcgatgaattacctatctacttgaaaaggctgggagtaaaatgtgattatgtattctgtacgggtgatatccgaacagcgaatgtaaatccccatttatttactgatgatatggcagcatatttgatttcaatatgcgaagctgttcaaacgtcagtagatagattgtatatagttcctggtaatcatgatgtggatagagatattgatggtcgtcatgatgttatcaggaaagtattctatgatggcaaaggatactatcacccggataatggcattatagagccagaagacctgtcggtcattatgacaggagagaaagattttctttcttttcttagcaaaatatacgacgcagaccgactgaaattatatggcaatccgaaaatgccgcattttaatatagagacagagcatttcaatattctgcatgtagataccaacttagcatacaccagcggacaggaacataacgacttgttcgttggtacaaagttattatatgatgcaatacatacgcttaataagaataagcctactatattgcttagccattatccggttacttcgtttctgcaaggagagaagaaagtactctcgacgatgctgcaacataatggagttcgcctatggctggctggtcacgaacatgaccaagttctacagaaagttcattatatctattctttacaagcgggtgttctgcgcaatgaacaaggtgtgcgttcttcggtccttttaggacaatacgacccgacaacttgtaagtgttttgtaaatgcgcatacatggtttgaagaaggttgggctaagtatccttatgttgatttggagaacacgcctcaagatgttttttccataaatttaagttctaaattaaatgatacgaccgctattcctcaagatttgaaacaagtgatgaacggccttacattaagagacgttaatgtagatttaattcagcaggagccgttgcttcctgtaattcagagcgataatatcatagaacgtacagctttgttgaatcgttgccttaatgcattgaatgatggtaaaatactcgtgatttttggttctttgaaaataggaaagtcgactttagcagcacaaatacatcagcacaggccaaagactgccatatatgattctgttctgcagacggatttggaaaataaggtaaaaatactgctacaggaaggaaagggaggtgaaagtgtgttggttagctccggagcattaaatctaaatttatcagggcttgatgatagaagagtttttcagattgaagtacctttattaacactaactgaaaccaaagaacttgttgatatgtatggaccagagcagaacccacatatgttcatttatgcacatagttgtggacatcctgctcttgtgcgaacactttgcgaatatttgaaagctaatcattggcaattagatgaaaaacatttttccaatcttttagcttatagttttgactataatctgagtagaacaatggctgaattaatgcggacattgttaccagatacaacagatcgtgcattgctaaatcgtttgctgatagtgaatggaagtttcacggaagaagatgcctgcaaattagccgaaattactccatctattgaagagccaagaatgcgcttaaatggattgattcctacatgggtaatgtctttagataattgttttaaaacgaacccacttatcagtaaattatggaagcccgatgtgtcagaacagactttcaaagatgccaatttagtattggcagaaggtattttgactaagaaaaaagtacttggagaacatgatgtattgaattatatcctatacagtattagaggtggtgcagatgacaatgctggaagaatgtacattacaatcttaatgaaattggatgatattggagaattgccacatggaagcctcctttgtaaattatggatggatgtccccttacccgagggaatgtctattgatgtcaagataggagtacgttatcttcaaattgcacttatcaaagatctgagtgcaactcaacgatcattcttgataaaggatttaaaagacaatgtctctaaatgtactgatgcagaaaaaataccgttctatagtagcatgattacaatgatttgctggatggaaggtgacattgagggtgggttgtcacattatcatcgatacctggaaagtaaaggtgatgacaacaaactattaaagactattggagatgtaaaacctgtttttgataataacatttggtttttccttctgcttttgtctaatgaacaagctttcattaactggcttgatgtattcaaggcagatgatgttgaatactcacataacgactatgtaatttgcgagtgttgttatcttgcaatagaacgactttggaggtatcatttagtgggtgaacccgttaatgatcgtgtggaaatattattcagaattttggcaaaagcagaacttaagcgctgttcagaacttgctatcgcttgtgtttttgcaattatggagatttttaactctgaacaccgttatgaagaagctcggtcgctatatgaaagcaagtattctaagtatgaggaattgccatttgcgcagttgattttgaatggttcaatggggaatagctacttccgagatgttgctgaagtacatggtcatgctcttgattactttaaaaggtcactttcgattgcagataccgagttgattcccaatattatgttgcatgttaagcagatgatggcatacgttctggctgagactaatattaatgcggcagtaaaagaacttgaagaggcactacaatatgtttctgatgttaaacatcgtatagatatatatgaatactatcagtgcataggagagttgtcatatacatattggtgtgcgggcaatagacagaaagctgttgaaaaactatcagaatgtgtgcgttttgtcacgaatgaccttcaagatggcaaagaaaaatttgccaagagttttatctgtttattagggtgtctaataataaagtatcagtgtgatttggataacaaacctatgcctaaagatcaagcgattcctcgtcatgggatgttcactgaaaatgacttaagttcatttgatgatctatatagcgaagaccgtatctatacatccagttatcagatgtgtcagctgtgtaaaatggtcggcttaagggatttggctcgtgaatgggcgcatagaacactggacgcatgcaagaaaagaggcgaagttcgcgagattcattatctactcttcctgttattaccatattttattgaggataatgataaagatgccatactttttgtaattaatcatacatgtgaagcgcagcgcattagttatgagaatcaccctgaactgcataaagaaaatgcagactttgagtttgttgagtttcgtatagtgcctcttctaatggcgtcgcttggtcagaatcttcgtggagatgatagtggtttgaaactcattaagaaggtattggacaattatcatccggtgaataattctgaaaaatttgaacttgtgaaatctgtgtttggtagaccttcgtatgataaagactatatagcggaaattaataagttggacatgaatgataactatgttgtctatatttgtgcttatctgatgacagcttatcagagtgaggcagattatgcattctcacttctaattgcacttttgcctatgttggagaaacaattgattcaaatcttgggtgaagagataaaacctattattaatcattttgtgactgatttttggaaggctaaaattctaacagctcctaacgaattcaaagattacaagttccttcgagaaaaggggctcccacatattgaaaagtatgaaggaacgataaatcaggcaaatcatacgatgcttgtcgttagtaatcatgtaaataaactagttaaacttaatgactcacaggaggattggatggataggtgatctttttgttatagggatagtcggtagtgtaaaatttaaacaggctctaaggtacagttttaaatattccttggtctttttccattacgataaatgttaaggcacaggctaatgtttcccatttgtcagcttcttttctctaagtttaacgagctctttcttggttatcgctttctttgccatatctgtattctgcttcaaggagttattactattgtttttgatttttgtttgagggacataattttgtccccagtctgacttttagaggacaaactggggacaaaattataaaatttaatacggtattttaggtttctttatgtatataaaatgctgattattagctatatggtggttgattttattattattgaattttccaaggtgtattttgtaatcagctgataataagtggtttaaattttgctatttcccgatgcaaagatgttagtaatctgtatgtcagttagttgggttgtattggaatggtatttgagccatgattttattgttggaaataggagtttaagtagttgtaaatcagtttattatgtactatataaatgttgctttcttttgttttcacaagttacttaccaatacacatttgttatatggttgattgtcagataattaatggctatttggctcgtatttgagccattacttccacttacttgtgaaaatgatttatataattgattatcagtgttttgcattatataccagcaatctgaatgcgtaattgctggttgagtcttcatcattcagctatttacccacacagttatataaacagtctgatgctcaatttgatacagctaattgaatcatatttgagccattaaattttacgtttctatccatttggaaatatgaacggttctgattttcttataagtttcaattttttcatcactttcctgatttagatgtgattttattagagtttaatatttaataacacagatgcgaatgaatttatctcctgaattcaaacagacaatgcaacagtgtcgaattcattgttagttaataatttatatttttcctttggggtcatgtaacccaatctttttctcggtcttgagtttaagatgttttgaacgcgcattacctgttcattggttatgtccctaaagtccgtacccttcgggaagtattgcctaatcaaaccattgctgttttcattggctcctctttcccacgagtggtatggttttgcaaagtaaacaaaaatatttagtttacgtgcaatttcttcgtgaaaactaaattcttttccattatctgccgttattgtatgtatttggtctctaaaaggttccaaggcatcgatggcagctttagttagcgggctggcatctttcccgctaagtagtcttatccatactagtccagttaccctgtcgtttatagttaatagtgctcctttgtgattcattccaatgactgtgtcaatttccaaatcaccaaaacgtactttcttgtctactatcgtaggacgcttgtctatgtccacgcggtttttgataaaaccacgtccattagtcaatgcacctctcttcttatgacttcttccccgtcttcttaaatgcttgtataacaacttatctccatgctttttatcttcccaaatatactggtagattgtctcatgagaaactgtttccaagccctttgttcgcataaacccagtcacttgttctggactgaaatctttctttatgagtatatctacttgaattttcaagtcgtccgtaaacttcacgaagtgctttcgtgaacgcattctggacatatacttagcctgagcgagatccggtttgtaaatgccattacgtttatcactattacgacgtaattcacgacttatagtgctacgatgaactcctacaagattggcaatctcggttcttgactttccgctttgcagataagcggaaatgttatacctttgttcttcggttagctgtttcatattgcaactgaatgttggggaactggaagatgcaaagaaacaacttttccacaggggaacaaaagggaaagaaatcttctttctctgttcctctgaaaaattattcttttcgtatcttctcattgtcatcattctcactcctgttgcattatccgcttgaacttaggtctctaatatgcatctatattttgcaaaattaggtaattatcaattatttcgcataatatgtatcgaaaatatttctcaatatctcatctgtgtttatttagtcgccaattatttcagcaaggagaaaaaggtattcacatatatacaggttttcagattctcagaaagatgtacgttatgttgatcctgcatatggtagaaatttatgctacatgattttttagcaaaggaataaagaacttactttctgcttagggatgaagtttataaataagtttatcaattcatatatacatatatgagttctattaaacttgtaaactcaatggcttatcctgttgtatggctgaatcagtcaagtaagtttagtttaagatacatgtatatatacatgggtaaatctaaactttaaacttgtagaaagccctccatcagtcagaatgctgttctggttgatggagggctatattggtctttttctccttgctgaaattgtatttctgtttatagttacaactgttgtaatagatggctggtctttgcccaatagtaataggcttcaggagaagtccttttcagcttattcagtcgcgaaggaagtgtgggtgctatatccagggagcctatggtggcaggattaccgtcgtatttttctattattgtgttgcccgtctctatcattgtggcgatataggctgcgcgtgctgcgtctctaatcgcatcgtcaatgaaataaccgccattgaacatgaaggatttgatcctttgtataccacgttgtagtgcatcaaattgtccgtttccttcacttccccttgttgccagacacagcgaagtctgtctgatatcatcgaaaatgagttttggattgtttggcaaatgcctgtatgagagttcaacttctgcaatttgtacaaacgattttgtcgttgtttcaaggacctctgtcttctcgaacagtctggctatatcatatagctgtttgatgatctccatgctggcatccttaccatttttgatatatggaatacctgttgtattgggtgcatacgccgtaagcttgtctccgagaatatctccaatggatggtacttttacataattcagttcaccttctgtctttataaaacggctttctacaggtaaagtcacgacttcgttgtagtgacagtcttcatttagaacgtccagcaggatggtttcttttcggtctatgccatcaaggaaagccacttgataaaagaatttggaatgcgattttggtatgtctgttccacgctgaattctttctatcggcttatagtcaataaagccatagtctttgtatgattgcagatactcttctatttcagtacctggaggacatattatatcaatatctatagacagcctgtgtctttgttcttttaaaagaagcatcagactgcttccacctttgaaatgaaatgggcaacctgaagccgccaacatgtccagcaatgaaaaggcatggatgaccttttcaatgatatttttgtccggatagtttagctccttggatttttcttcaatccatcttgctgtaaagcattctttatttatcatatttttgtgattgttctattaatgaataagtactatcgtatgctcctctacgttttgcatatcggagcattttgggagtattgactgtgtacaaatcaaaggcggtctgatacatataagtgatttccgtgccctgcatataatcaaagtcttcgtctttctgtatatctacgagtagcttttcgatggtaggagtaaccatcccatcaaccttatttactggagattcagtgacaaatatctttacaatgatgcatggttcatgcatgtttacgtagtcgtacatgaactttgctgtcggttgcttataaacgggcatgtctgaatccttcaacagagaaaaaacagaatctacagcatcccggttggtctcgacataaatagcatggttcacagagacgtgatgttgtagtgtggtgaagatgctgccatcgtagatgcagaaatcggtgaatggcaatttctctttcaatccgacatatagttttctcagtgtttctgttggagcaaatgagaacacctgtttatctgtaagcatgtattcaccatttcctgtacgggctatcttgttctctttggttaaggtacagagatactggcgggcggtattggtctttatccccaatactgatactaattgaggcacttcaatccgtccgtaagtacgagcataattcaatatgctctgtttaatactatatttctcgtcaatactcattgcagtgcaaatataatataaagtcggcaacaaaccaactttattgccgactttatatataagttctgagcaattaatcattctttagtgtgtttttctatattaagtaacaccattatgaattcatcatattatgtaatatatgaggtatttttcttgtgttgtaaaagcatagtattaaaagtatcccgcaaatgactaagaaattaagtagaatctcttattaacgaaactacacctatctgcttgactgtttcctaatatgaagaggtaaatatttctcgatcaacaatctgaaatcacaccataaaacattgtcttaccatttacgtttactctttgtaaaatgattccattgttctgctaggataatataaagttggcaataaaaccgatttattgccgactttatattatcaaattcttttatccgggctgttaactactttatgagaatatttacatggttgtgcattgtctgtcggtgcttcagtaaggagaaaatgtagttcccattttctttctcatatgatatttctattcgcaatgaattgttcgtcagtctttttataaacctgttcaggtttgtaaccaaagtttaaaatacatgtatatatacatgggtaaatctaaactttaaacttgcagtaagccagagtaggacagaagtccgctctttgactgataggcattgcctttctttttctccttgctgattttgcaccttttcatcactcacatgagtggcatcagccttgttgtgcttcacctctggcttccatcctcttgaatagcttccgtgttcagacctttttatgcagagtgcggagtttcgtatttctcttgctatgctatgccgggttcatggtgaagtttgggagttatcgctttcactatgtccggattgcttgccatggatctgtgaaacctgtcgagtctgactatgagaacagcattctttaccatgaccagacacaagaatatcaggccattcccttcacatctcattttggacgaagccgtgacacttactttttcctgttgcgaagttagtgcaagccgcatactgcaagtaccagaaccttattccctgaattttttcaaaaacttttccagctgcagcttttcggaaaacttttcctgcctgacggtgaaataattcggtaattacttgcctgattgctatccttgccaactttgatggcaacgtaaaaaataaatgtttcacttctaaaatttcaatgttatgaagaaaatggaaaattctttcgtagtttctggttttgtaggtaaggatgcaagcatccatcagttctcaaccgcaagcgttgcacgtttccctttggcaatcagccgcactgagaaatcaggcgaggaaacaacccgcacttccgctttcataaacgtcgagacatggcgcaagaatgagaatactacatcctttgaccgccttgtcaaaggagcactcctcacggttgaaggctatttcaagccggaggagtggcaggatgccgacggtgtcaagcgcaacagagtggcatttgtagccaccaggttctatgaagctgttgaaaaggaggaaactccagcagctcaggagaagaactccaagaagggcaagtaaatcctttcttctctccaatagagcggccttcgggtcgctttttttatgcttatacttctctttgccgagattcgttcctcatacaccgacttcggggaactggcataaattccgttgcgaaggtaattgtccggtcttgtcatcagcaaggtcagggcttcgctttgccgcaaaatctccacacctgcgggtagtattttggagcaaaaccttgcagagacagccccgacaccttcttggtgcaacaaaatttatatgtgttcccgaagtagttgatctacgagagggaagaaaaaaaacagatgatattatgacgacaatccaatcaatcctgagccgactgaccaaggctgttggcggtactgaaaagatgctctacatagagccggagttgaacaagtttgcagagttctaccttgacaagtgggacgagaacaccagtgaggatgtcatagccgagtctttcactgacttctggtgggacacagacagggcttgcagaagatgttcagagtgtggcagactgatgcgtgccgggtattgtgctgacatgggagtagcctactattgcagtgatgaatgtctgcacagtgacttcaccgatgaagaatgggctgaggaatgcgagaacaacgaccagagttattatacggagtggtaatcttttaaaattcaatgatatggcaaatttagcaacaacgacctataaggtcactgggacacgtgaagcagtaaataacctgtggactacctttcaggacatggaagtggatagtaaggatataaggctgttcaagcttgccgagcattacggcattgactatgagaaaaagcaaatcagtgttagaggacatatctattgggctgaatatgaagaagacgaagagaatgattatttccttctttcatttgagacagaaaccgcatgggatgcctgtaacgaactcttctttgaaataaaccggatattgaatgatgaactgagtatttcatacagatgttgcgaaagtggatgtgatttgttctatacccatgacgagggggatttctttcccgaagaatgttgtgtgagttcatacggcgaacctttcgaggatgcatgtgaggatgtttttgacaccattgaggatgccatagctgaatggacatcaaagaccggtattggacagggagaccgcagtgaaaaagaaatggtggattttatcaatagctatgaatacgaaagcgaagagacctatttctacatccacccttttacattcgaataacatacccgcaaggacatgaggcaagtctcgtgtccttgcataaaaacaagataatatggacaggtacagcgcagaactgattggagcatcttgcgaacttataaccccatgcaggggctgtagccatggaataattgtggcagtgtataacgaacaacttcttgtacggttaatcagcggagcacaacgattagtgagcaaagatgaagtcatattattatgaccctgatactttccctgactgttttcaactgttaggagacattggtaggtgtttgtatatcatacatttacctttgtatacattgatacatgtggacaagtacacgtgtaaacaggaatacaagaacacattgaaacatataaacataaaaacaaatagtatggcacagaaaatcatcactttcgccaaccataaaggtggcgtatcaaagacaacttcaaccgcctctatcggggcttgtatggcaatgaaaggcaagaaagtcctgcttatagaccttgacggacaggcaaacctgacactgtatttcatacctaatgaggatgaaattgagacgagcatttttgattcattggtaaacggtgttcctttgcctgtaaaacatatccgggagaatcttgaccttgtcccttcttcccttgaaatggcaagtgcggaaatagctctgaccaatctgttggcaagagagcaactgctcagccgtctgcttgaaccgctcaggaaagactatgactatatcctgattgactgtccgccttctcttggtattgtcactaccaatgcctttatcgcggctgatgagatcatcgtaccgatgacaccggagctgcttcctttgaaaggcatgaggatgcttgacgcatttgtcaccaccttgcaacgtgtcaaaccgtcgcttcgcctgggaggtgtgttcatcgccagattcaatcatcgtaaactgaacaaggtagtggaacaggctgtaaaggagcgttacgaaagtatcaccatgaatacccgcatccgtgagaatatcgccttggctgaatcagccggtagtggcaaaagtatattcgagtatgatttaaattccaacggtgcaaaggattatcttgcacttacggaggaaattctttcacgtaaccaataacaactatggcaaaaaacaatatggacattctgcttggcaatattttgggcagtgctgctatcagccctgacaataaaacagtagaacaaacacccgagaccaagccaattccgaaacaggaaaaacggtcagtcaaggcagaacgtaaagagcaactggacaattcctggcggcatttctcctttatctgctccagggaacttgtagataaggtacaggcaatagcttacaaggagggtttcactatacgtgcctttatggagtatgtgatgaaacagggcatcgaggcatacgaggcgaagcatggcaaggctcggaaagtcaagtccaaaagcatcaatgatgtaatgtaaacgtgtatacacgtagccatgtgtacgtataggtatgtgtacgtgtagcaatatatacatgtttacacgtacacgtgaatacacagatatattcaagtcaataacaatcaaaatattatgaatatgaataaatacttctcatttgccattgtagtattcctaatggcagtaccattggtattaacttcttgtggcaaagacaacattttggatgatgttgaagagcttcagccggagttgaaagtatggacggagccttatcatgttgaaagttcaaccatagacgaggtcaagaactatatggagttttcaatgaagcgatatggtcttgtatcggaggcaacaatagctggttctattcaactcacttacaaaaccggcaacggtaatgagggtatcctatatagcttttatgcttcaaatggggaattgtattcggtaatagatacagagctgatagctaatagccgtctggttatcgactatttgaaggaacattattctctgattgttccggcgaacgaggcaacacttgaatactgtttcacgaactcagacaggtcaatggtcattacgactgcaaaggtttctgacacctatttcaacgtaaattacgcctacgtcaattgatattgtcttatatagctttgagccatcatcaagtcttatgatttggtggtggctttttgtatacatgtattcatatggacgtgaatacatggttatatgtaaacatgtatataagtccacttgtataggtgtatatatgtaaacgtgtggacatgaatacatgtggacattggatgaatgaaagataattctctaaatcattgatagacaaatgaaataaaccctttatagttgaatctaaattcgccttcttgtaattgattaaagcatatttcataagctttttgtatgctgacaattcacggcttgtcagattttcaccgcaaaattactgtgaatgtccgaacgccaagtaccgattctctaatgtgtctcagattggtatggcaaccttccgcaaatcagagatttgggtattccatacaaatctacagccatttacttgtcttatcttccatgtctcacagtatcgggagcgtgaaaatttgaagccctttgaaattgtcatgatttcacaaaagggaaatgattaattttaatacttatagatatggaagtacaaaagattcatccggcagaagagtatcttcgcaacgaaaagaaccccacatcattgtatgtcagaattagtggagaacgtagaaagttgttcattaaccgcagtgacggagagggagtgattggcattattgcaaaaggtaaacgcaaacgaggttatgttttcaatgcctggtcaagcattgagaaagtctattatccgaccactgaaaatgaagaagaggcagaaaagaagatgattctcaaataccagaaacttgccagacttgccacacatacaaatgattggttgcgcaggattgcaggtgcggatttgacaaaatccctttacgagaaccatataaccacaggaacaggtattgacggaaaatgtatcagattgagcaccatcgagaagtattgcggctacatggtgatggcatgcttcagggaagccttcaaaaagaaagagaagtattcaagctataggtttgacttttgcggttatgacgggacactttggtgtgaaccgaaagagaatggtgatatgatagccggattcagcaaggaataccgaaattgtggtaacggttattattatctgcttatcaatgatgattgtgtgataggttatgacatagactgatatagttataattcaaacagaccatatcgggaagccccgatgtggactgtttgaagatcgagtatgctgacggttgattacctcttttaatacttacattccaggttggaaagtagtgaatatattccttgaaaagtcgttggttgttattccatagccaaaattcctgtttataagacgtagtcagttctgatatatgtttgaatctgtaacgttatttgtagaactttttttactcttcgcccacgccaatgtccgcattcgcaaacagtttgccatagagatattctgtccatggtcgagtggatcgactatagccagaacatccctctgtcaaaagtacggcaggagcattccgctatcaaagatagtggagagctccttaatgccgtacttgctgttggcgttgcaggacatttcccacccgacagttgtaatgctatgctcttacttctttataagctgacgcttcccttgacttttataatcttagagttttctttttcttgtaatcttcgcccacaccaatgtccgcattcgctaacagtttgccatagaggtattctgtccatggtcgagtgaatcgactatatccagaacacccctctgtcaaaggtacggtaagagcattccgctatcaaagatagtggagagctccttgatgccgtacttgctgttggcgatgcgagacatttcccacccgacagttataatgctatactcttacttctttatcagctgacgcctccattggtttttgtaatcatagagttttcatttctgtaatcttcgcccacaccaatgtccgcatcctctaacagtttgccatagaagtattctgtccatggtcgagtgaatcgactatatccagaacacccctctgtcaaaggtacgtcaggagcattccgctatcaaagatagtggagagctccttgatgccgtacttgctgttggcggtgcaggacatttcccacccgacagttataatgattgtattcagttataaagttcctatatactagtattttaaccattgtgtcttcattcctacttgtgattcagcgaacttttttctgcaaagttgttgcatccatcaccaaattggcaagtcgttcttagtaaacaatcttccttttccttgaaaagagtattgtccactgaagacttgctgtattggtttgtctgcactttgtaaaacagaaaaaacttcccgatcacagtccgaaaggacttaacaaaagggaaacaaaatcagagtgcagtatgaacacagtgaatgtttacatcaaaggtcaggaagacaaggaactgattagtttcttgcgatattttccttcacgcatcaagaacataggaatggacgcagtttttgaccgtcagattgtctatgactacaaggatggccgcaaccacctggaggtggccaaatgcgtggcaaagttccttgtaaagaagtttggccgtaagatatgcaatgtggtattctcgtgcatccctgcaagtagtccggaacgtaacgaaatgagaaacagacatttttccgagcttgtatgcaagttttccggagccattgacgggttctctcatgtgagtgtcatcggtgaacgtactgcagtccatggaacaaagataaaaaaggaagagcgtgccaaacggataaatgagcagaacaacattgagattgatgctgatttcttcaagaacaaggaggtctgcatttgggatgatgtagtcacaacgggtgcatcctttaatgcctatgtctcccaattagaacaggccggagctcatgtgaccaacggcatcttccttgccaaaacaagctataaatacgtactaaaatgacaattatgaatgatttgaaatttgacaggacagtctcagctgcttttacaggacatcggttctatgacttttcccaaagggaatttattcaggaacgccttacctcagcaatatccgaagcctatgaccatggcatcaggaatttcatttccggatttgctttgggaatagacctgatggcagcacagttggtacaatcgctgaaatgtaatttgcccggaatatctctgactgcagccataccgtttgaaggccaggcagagagatataatatctatgataaaagagtttatagacggttgcttgaactggctgataaggtaattgtgctcagtgactgctattatccgaggtgcttccttgaccgggacgagtttatggttgagaatgcttcatatctcattgcctattatgatggccgtgggaaaggtggaacatactacaccgttaaaaaggcacgggcgaggagcatcccgattattaatgtgtattgattttaaatggaacgagtatgaatgaaatttttgatactgttattgtctttttcgtcttccgtcttttcttctacatcgtggaagtatggtggaatggagatgaacggaacgatttcagaagagacagatagcaatcttgatatataagtcaagtacaggtgagtaggagtggtcttgccatcagcttctacaggacaatcacgctttcattgcagggataagtttttatccttgctgggtctttgcgtattttggtgaacgaaacttcggtataactcgttataactccggagtaccatgtcttctgatagacagaatattatcaatcagaagcactttcccgtccgataacgtgattgttcttgtcatctcgtcgtatttcttgactgtacctgttattgacacgtatttgcctccctctttttgagcatcaggtacgtaatgcacgaaagtgtattcttcctgtcccggcacctgttcaatgacgcaggtgagttttcttgtaagacttgccatctcatcatcagaaaggagtttcttgggggtagtcagccttgctgtttctgctatcgcttcgtcatgaccggtgagagctgcaaacggggcaaactgggcggcacggttctccatggacatgggtgtcctgttcttcgatacgtggtgtggcaggttgattatgtcgtcatatttactcatggtgtcctccaatctgttggttacgttctttctgggtagctccatctgcatagttgatgcctttcaggatggcattcttaccaaacttcttctttatactcaggatggcttcctgacgtctgcgttccttctcagctttttccaagtcagcattccgatgtctttctgactcttcgtaatcagtaaaaagatcgagttggacgattttaggttgctttttatactgctcctcatgtacgaggtgattcaccgacaggttaagacggcgcacgagtaggacaggattcactatgcggccgtacagttcagccactttttcggagatgatactgcctgcagaagtcggctcctcaatattgatggtgccatgagcattgaccggcacctgtctgccgtaatggtcggttgtaatcttaccatggtacttctcccttattgaagggttggtcaatgattcaatgtcgtatccgacggtaagcaccaactggtcagtgagcagcctcttgtccacaaggtcgagcgacacactgtcggccatttcaagtatcacattacgggccatatccgtagtgtaagccgactggagaacctgtccggaactcaatgatttgctttcaggcttataggctttcacatattccatggtaactggttcccatccccaggcatggtcaataagcagttcagcattgactccaaacatctggtacaggaatccttcatgttctatagagcatctggctacatcacccatcgtcaggatattgtactgggcaagccggttggcaatacctttgcctacacgccagaaatctgtgagaggagtgtgttcccaaagcaatttgcgataagtcatttcgtcaagttcggcaatgcgtacaccgttttcatcgggtggcatcttcttggccacaatatccatggctaccttgcacagatacatgttggtaccgattcctgccgtagctgtaatgcctgtatccgaaaggacatgacggatcatcttcattgccagctcatgagcagtcatcctgtaagtcgcgagataggtggtagcatcgatgaagacctcgtcgatggaatacacgtggatgtcatccggacttatatatttcaggtagatgtcgtagattcttgtactgtattctatgtagtgagccatgtggggaggagccaccacatagtctatggccagacttttattgctgtccagctccttcttcgagtaggattttccactgttacctcgctgcctgtttgccacacgtactttctcaatcacctcgaataagcgaggacgacctccggtaccatacttctttaatgccggcgaaacagccaggcagatggtcttttccgttcgtgaagcatcagccacgacaaggcatgtgtcgagtggatccaatccccgttcaacacattctactgaagcatagaatgatttcagatctatggctatatattgtcgtaatggctctgtactcattatatttccggaaaacgatacaaagataacgagaatcctccaaaaattccttaatattgttattgcttatcagttatatacagcccatatctcactcttacatgcagtcccggagtgattttcacctgttatatgtctgcctttaagcacatccgctgtcgtgtcagaggaaaatttttcagcgaagttatcttggatctgtcaaactgcaagacgtgtcttgtgaacaatcttcctttaagtgacaggcacttaaagagtattcttcatgccattcttgccttatttgccttctccaaacttctgatgcagaaaaatcttcccgacacacagctgaaaggctgtaacaaaagggaaataaataattcagatattatgacagtaacaaaattcaacaatcgtctggtaactccagaactgagagaggctctgagtgattatcccctgtattcacaggacgcaaaaggaaaggatgcgctttgcatcgcagtgtttcaccttggcaatatccgttggtatattatggaaggacagcccgaaggagatgacttcaccctatatggtatagtggtcggtctacatgaaacagagtacggctacatgtcagcatctgaaatggccgatgtcacttatgatgcgagtaagtacggactcggcttattgaagatagaacaggataggagtttcaaatcttgtgccctcagagaggtaaaggataaagaacttcagtctttcttgtcaagactttatgatgaaaactaatgtataacttaaaaattggacagctatgaagattattgttgtggattgcgcaaatgtccgcatcgatgttttgaacgttccggagaatatggttggagaggacgttgaacttttccttgtagagcacgactacttcttgaataacatttcatggatggcagttcctgcagattatgttccggtgcagtttcatgaatttggcatagatgaagagaatggcaaggaggtacatgaacaaagggataccaggttgaagaatttttcaatctatgatagcgtgcaggaggtaaagcatcgcgaacaggaagagctcgtttctgcaattcgccaatatggtgagaaggttgccgatggctatgaatggcactttgagggtgattgcccgatagtggcagcgtatgactatgatgagccttgtgatgtggtaatccttgcagtgagggttagcaatgatggaagaataaccatcataggagatgagaaaaacgaccggggcaatgaacatgagattgatgccgatgatatatttgccggtcacattgatttcattacgtcggaaattgagtgataagaacaaaggaacaggagccacagggatggtcttctgttcctttactcgttgcagtcgtacggttatagctgctatgcggataaaccttaaacactcagatgtctatttccgtaaaccttgaaaagcgtcttccgtccctttctatagtctcgaaaaacatcttttccggtctgacccaataagatttctctccatagagagcctgatatacaaccatccgctcctgagtttcactgtcaaaagcggaatggatatatttataggtaccacccttgaaatgacggaaatatctttcttcttttttaggaaactccatcagcatcttcatggccaagggcgcataccaggtcttcacttcctgttctgtgggagtatgcgcacccgggaaatgatgggaattgttgtaatgctccaggaacatgggctcatagtgagccagtctgtcctgttcgccgaatagtccccagacacggtctctgtaatacggattacagcagtcaaactgaatcttttcgagtttggcaaactcttcgattaaagcttcatctatgataaacgtctgattgccgtccttgcgtggggctttgtactgatgctcaccgattctttctttcaagaatttcgtcatctcaaagtgcggattgccaagcaatgccgggatgccgactatcggggcgagcatctgcgcaagaaaagatccgcagctgttacccagcagcaggtcgggcgattcctgttcaatgattgagcgtacctgttttaatgcctccttgggatgaagcggaaggtctggcgttaagacggaggcatgattttcaaatgcttctttcagagcaactgccatcggacaacttcctgtggcaaagaatccgtgaaggaaaagtatctttttcattatagtcagcttttatccatatctttcgatgtatcctcttcatttttctttttgataggtccggaatggtttcctctattgagtttgatgccatgcttgttcagaatacggaacacagaacttctgcttttgaagccgcttgctctccatatctcatctataggatgaccggctgcatacagattgataactgtcttttctctgtcgagcttttgtaattttgtggaagaaaccttcggtaatgatgcaatcatcttcgcctgcaggttcaccatatgctcggcagtctttctcaaagcaagtacttcttcaggtaaggcacccatcatttccagcacatccgatggcttggtttcagggaaaagctggttcttggaatcaatccggtcgtgtatgcttatgacgcgaatagcttttacccggcaaaattccaggaaagtagccagttcccgactgccacggatggcatttgaaaatttggggataacaagttcatcccccctttgcagggcaaccatgagttgcttccaaagcggcctgttgcgttcgttctcatcgcactcctctacaatgcgtatacatccgaagttattcatccactccctgtcttcttccagtttgtcatactgggatattgccataatgtaacctatctttgccatattataaaggttttgactgataatcaaatagatgtcttatcttgtcttgaaaaatatatagtatgataattctccaagagtataatgaacacgactctgatgcaaaggtataaattatattcatattggtaatcatactgatatgacagattttataatcgacttcttttttaacaacttcttattatcaatagatatgtattataaatcatactattatgagtatgaaatataaattagtataaactgaatattttatactgacaatgtggaattttatctatacatttgccacataacaaacaaaattatgccaatgatatatagaaatttaatcggtaagaatcactgtagtagcggtttgattggtatgtctgacgcaggttcaggaaaacaagtgaaagaaagtaaatcaagtgaaagaaaaaatactcaaatgagtttaatctttcacttgatttttttatgctctgtactcttgttttactcatgcaacaatcatgagaaatatgattttgagtcctctgatgaagctctgaatgaatacgataatctttataagactgtcagatcacaggaaacgtgcaatgccgagcaacttgcctcatttatcaatctgtggtatgaatgctcagacacagtctacaaatttattcagaaagacccttcgtttacggctcatgccggtctgaccatgaggtttgacagtataacggattccattcgcacgaggttgatggagcttgcggacaactttactctaagcgatgtggcatatgtcaaacttcatacttctatctatggtcaggataaggaacttgactcattaaagcgacatgcaacagtattcttttcctcattggatagcattcctgtatataccgggaatattagagacttacttgccgattactcagagtttctgctttcatataaattacatggggtacactcagaagatgcgcttcttcgatttatccgtatggaagacttcttcttccgaagctttcttgcttccattgacgagtgctcagctttgggtatggcggatattactgatatgacggccaatatttgtgacagcatttataaggaagcatcaaatggtaaaatcaaggctgatgaaactattacctatatgtccatgaggacaggccgccgtctgcttctgaatgccaaagtctgtcatgagaaactgaaacgtggtatagtaaaggattcgcaatatgccaatgcttacttgtggatgatgttacaaccttatctctcgatagatgcccttgccataacaatgctgacaccggaacagattcggcttatgacggatatggcaaaggattatccggctatcatttccagattagacagcaaacacttaatcgatcgggatgtgaccacaaaaataccgaatcagctaattcgattatacatatcaaccatctaatcatataaatatcatgttacaggaagctattttaaaattcagatcatccggtcccatattgttgccagccattattgataattactggcttggggaaatcaagacttacgaagattatgccgtacttccttatgaagtacacgaacctcagcctctcgaaaaggttttggacatgtttgagatgaatgcggatcttgccattctttaccacatagtgccatcatccgctaccgcatacggacatgaatgctgcgcctactgttatccggtgacggaacgtatgttcaagataaactgcaagacacatacggacggtcttatccatgagttatatgttaccatctacaattccattgaggttatgtctgctgacatttttgaagatttgcgactacatgaacgtcgtggaaaattcatagaaaagcgagagcatgtccagataatgaatgacttcaactgcggactttgaatgaacaggaaaacgtattacctcattgcagacatcatacagaaaaacaggacatggataaaggttatcggtacagaaaaactggtagagatgcgaatacttcaggatggaatgctgaagccgctgctgtttaaagctatcactttgaaaagctacagggaacattactgtttcaagaggtcctgtacctggaacatcaatgaatacgatttgaacatgggtctgttggctctctgcaaaaaagacccttcagcctctgaacggattaagcatgatgcgctcactttgcgtgatgtcgaatacattatagagaaagcttctttcggtataataaaacttgaacttgacgattatgaatactaacaggaaaatttatgttttttattttacagtcatcctgctggctgtactggcgatgatggtatttgacctgaatataataatcaaggctatactgtgtttcctcatattctcttgcctgatggttatgagaagcattaaaagggcctatgacctggccgatgatattgaccctgatacgttggacaagatgacttcattgactgatgattatgccataggagatgagaaaaggaatcacgattccaatttggattcttatctgaatcttctcatcgaaacggatgaagaactttcaaaagaccccactattgaccagaaatcgttcagctataatgtccggttgaacaggcgcatagctgaacggttggagtcaatccagagaaaagagcaggaacacgttgagaatacaaataactaaatgaattcactatgatacatacattaaccatcatccgttttttgttcccgttcctgctacttctggcatttttttgcttatataaaaaaccgtaccgctgcatgcaaagcttcatgtggaggatggtagtatttgacagtgcaagaaaattttatttaagtattatgatgcttacactcatcttcatcaactggtgctgttgtatgacagagcccaatctggcagttggactgtcaagcatcctgacgctggcacttttgaacagaaggattgccgatagtacccttcatattctgcatgaaaggaaacggttttggcttatcacactcctgatagcagtggtatgttatgccaccccttatatgaacagtgtgtttcagctttttttcctgctaagtgtggcagctgtcttttatccgtctgaaagagtccttcagcagaaaagcgtacttgaagactgcgacagttttaaaagccagatggactggataatgaagaactactattaatgccacttacatgtggaatatatattccttgcttgcttttttcccactttttaaatgtaatctaaaaatgacgcaaatgactaacaataaaaacaattcttctcctgaattgaatgacccacagggcatagaccgctccctgttggagtatctgaagcctaaatcagaggaccgttacagcaaactggaagcctattgtgatctgctcaccagagcgacatcaggaacatattccacatccgttgtagtaggaaatctgaaattacttcccggccagtttattgccaccatatctgaacttgcaaggaagtggcaatggcaacgtgctacagtccgtcagttcctgaccggtcttgccaacctgggccatctaaccatggagcaattctcaaaaagctatgtgttttccgtaagccaggaacaacgcctttctctctttgttgagacaccgtctgatatattggacttcaacgcacttcagtttgtacggttcattaaaggacgcaacactgccggtcaggtggcccaatcatataattgttatttcaacaaggttatggaattggcggtaacggagaacgacggaggcagacctgcccgacatgttctcaaacagcagggtcaagtatttgactcgctggcaaagtccatatttcaggtcttgaaaatggagaaggaaatgcctgaagaactgtcggattccatcggccttctctttggaaaagaccatgtatgggactggcagaaagtaatagaaatccttggcattctggctgtggccatacgtgaaaacagaaagccgggttatatggcagaacccgtatcccgttatacgaaagcagaagttattctccttgactgcatatttgaatactacgtatctgacccgggaacattttattatgatgaccctcctcgacctgatttaagccccgtagaggacagaacggatgataagcctgggggcacttcctctattgaaaacggaacggattaaacgccttattaacgatgcacggcatgtcatacgcttttatacacttcgtctttgtcccgctaacggatagatgcaacgacaggcagcgtgcttgcacgtgccacttttttacagtctcgggaagcctaataccccgaccgctatgaagcggcgggagggctgaccagataaacagcaagctgggtcagttttctaagtgtgcgtatgaccgcaaaggagactgaaaaaaggctcagaataacgcaaaaaataaaattgtcattatgggtactacatcaaaacaagtcatggatataaagacttccaaagggctctcacagacgagcaatgaggagttacgtgcctggacggataaaggatgggagcaggctatgcgtgagggtaactatgaccgtagccgtgaacatcttaatttcgaggtacaaaaaggtggcatagtcacaccgatagataagaagcgtccgctgacaaaacgcatggcagaaaaccttgcgtcacgtggcatcaaggatccgaatgaaggactagccgagccacgtttccggacagtggtcaacttcatattcggaggctcaaccgaccgtatgcgtgagctggccttcggcaatcaggtagttgactttgagagcaaaggaggtaacgaacatgtaaggcgtatgccggaaatagaagaatgggcacgtgacatttatcgcttcgtggcagataaatatggagaggaaaacatcatttcctttatagttcactgtgacgagaagaacccgcatgttcactgtgctctactaccgatagaccagaacggcaagtttgctttcaagcagattttccatggacagaaccgtctggagtttaagaattatatgcttgccctgcacgacgagcttgcgaaggtcaatgaaaaatggggccttacaagaggggtgtcggttgtagaatctggtgcgaggcatcgctctactgaggaataccgacgatggctggccaatgcctgtgtgacacttgaagcccagttggagaacaacaggaagttgcttaagtctctgaacgaggaactggcaatagcccagaagaaacagaagtcatttacgaccatgattgataatctgaagacggagaaagaccgtcttgaagatgaacttcgtcctcttcgggaaatgcaggccaacagcgagagtatcagtgcagagattgcacgcaagattcaaagtctcgaataccagaaggctcaggttgaagctaaactggcagacaaggaaaagaaacttgatgagactaaccggttgcttgaagctcttcgtgaagataaggctgacatcgagcagcaagccagggaactggaagacaaggccaatcagtctgaactttcatgggctcataacatgagctatcacttgaacggtgcaatgcttgacacaatgtcacaggagttcacatcccgctatcaccatctgccggaggaaacaaaatccttgtttaacgatacactgatctgccaactggcagaacagggaaatcatgttgtcatggttgccttgaaccttgtgtgcggttatgtggacgatgctacgaccattgcccagactcacggaggtggcggtggcccctccactggttggggaaggcggccggaagatgatgaccgtgagtgggcacgtaggtgtctggcaatggcacgcaagatgtgtgcgccatctgtcaaacggaagaagagaatgtaatggtaagcctgttggcttatgacagtatcaacgactattaaagtataaactatatgagaaagaatattcttatgcttttaactggatgtcttgctgcaatgacagtctctgcaagtaacatccatcacaatactgacagcatttataagcaaaatactttcagtcaggagcagatgctcttgcctatgaatcctacatatctgaagaatgtaagcgaagcagccaactggggtagaaattggtttatagaaattaagggcggggcttcagcttttctcggatcacccattggttgcggtgatgtgttcgaccggataacacctgccttgaaggtaggtgttggaaagtggttcacacccgcaatcggtggacgtgtaggtttccagggactgacgttcaagaacgctgagttcaaatccatgaagtatcagttctgtcatgcagacctgatgtacaatctgacttcaggactccgtcagaatgagtacggactctctctttgggatattgttccttatgtgggagtgggtatgattcataatgcggactggtctgatccttgctcatgtggcagtggttcagatggcagccgtccgttcgcctttacctatggactggagataggttacagaattggcaacagggtaaaacttgttgctggtgtcagtggactgactacagcccagaattttgataatatgggtagctctataaaattcaaggataatatgcttacggtctcagccggtctctccatcacattaggaaaggctggatggaagcgtgtagttgatgctacaccttatatcgagcagaatgcttatctcaaagattacatctcctatatgaaggatgagaatatacgattgcagaaaaaaatgtctagagagaaagaggtgctgacagtctatcccaagaataactatagtgggcttaactcactaagagcacggttgtccgggaaaaagtctggctcaccagaaagcaaatcaggtattgacggtatagctgaaaatttggatgatgatgcaaaagtcggtcttgtagatacgcatgtacggactgggaactgccagtcagactcacttttgtctgccggtcaaaatgtatctgataatcttatgtctgtaaataataatgcattggactcaatagtaaattcaggtaattcaaagataacagtgggtgttccggtgtacttcttcttccagctaaattctgacaggcttgtagatgaatcccagattgtgaaccttgatgacatcgctgaaatatccaaggcgcataatttaagagtgaccatatccggagcagcagacagtgccactggtacacagtccatcaatcaggagcttggccagcgtcgtgccagatatgtagctcaaaagcttattgatagaggggtacctgaaggtttaattcatctgcacagttttggtggaatagataagtttaaggccaatgactctaaccgttttacggtggtcatgcttactgaatgataatagataatgcgaaacttttgctaaaaagtcgtgagactttgatttgtattttatccatcaaattatggtttacatagagaaggtatgctcggattttccttgcataccttttatattacctattatatttttttctaaacaacttccatgctcatccggtttagttcaatttgtgttgatgacaaggtaatctgctgaaaattgtaaagccttttattgtatattttgctacacacatattaagtagcttggcatccttatctgatttagatcctaacagtcgaaaacataatatttcttcgatacttaagttgtaaatcgatttttaaaataaaactcctctgtataatgatagggcattgtcattgcctatgatacagttcaattccaattcgccacaagatgccatataactgtcatttacttaatatgccagattttaaagttattggattcgtgtaaagtggaatatgtgaattttgttttcatataaatctgaacattcggaatgtaaacactaccctaagcaaaacgaaagccggaatggtgaaaatatttctattttttataataggaactgatatcactcaaaatcttcgttagtatgttcttaagattatattttgagtaaaggacttggcttttcaaacggccattatcatttttcttaaacagttcactatattctggaataatagatgagaacagcgattcgttttgggtgaagcacttatcggcaaataattttctttcttcatcatttatggcatcatagtgagtcggacggataaacaggtcgaatgcatagcaatcttcactattcctgttaccattgtcatcataaaaatagacatcaatggcaatagttctattctcttctccggggattttgaaatcgaaatacatacacgatttttcttttggccatatagaaacgctccatccttgttgatttatggaatcctttttctctttataatccaaaaacaaagatattgtgcgcagttccatcctgttactgttatttccatttgccgattttagcacgatgtcataattattatcgttccaaacacaccgttttgtatccatgaacgcccaaatagcaggatacttgataaaataataccgatgggaatctttatctttcttacgtatatcctcttcgaagtttgaagaaatatcagtaatatattctgataagacgtttactaaatctttgccggacttgaattcagggataagtaattttttcatcagctgttgtagggagcttatatcataatcttcttgggttatgtattctctccactcagttagaccattgttgaaagaccagcatgagcttacttctttcccaaagtaatatggagggaaagacattaatgctctgcgtaaaaggtaatccttttcgaattttgtggaaagtccattatcattaccgtcgaataattcaagcagaacggatgaatagcttttcacgttttctttcgacatacagtcatatccttcttgctcttttagcatacggaacaagatacctattctacctctgaagaatcttccgttctccatgttaatcatttcatctttaaattcgggcatagaagcctttctggtttcttccttcacttgacttttgttgaatttatccaatacattcttcacatcatccgattgtaataccgtatatatattgctattcttacacagtgtgctgaaagcgtcgatgtctttaattattgaaggtaaatcctcactgcctataacagtattgagaatgagattccgcattgtcctcatccaatcaaacagctcggtttcgccttcctggtatgccaacaaagcatataataatgggagtgttctgccgaaagagccttcgcacatacatagttggtaggtcctggatgttttttcggaatcggattctccaatgtaaagctgcatctcattaaattttttacaatatgatgtcagcgtgttaagcttattataagcaaatttaaagaagccgggtgatagcaagttaagacgctcaaaccaggtgagcgggaaattgcctgctttctgcagtctttctataacagactttatcacatccttgacttcggtcttttcattctttccgaagaatgaggtcaactcctcgtatagaagcgtttcttcatcctttattctgattatcgtatcaaggagctcgtcattctggatatgatagagtatgaggagattgtataaacagtacagctgttcatcgtcaatctcttcaggatgttcctgctggcggttccggttatcccaaaacatatccgcccacttattgtccattttcattttccaatcctcagcaaaaaacaatccagccacattttcatccataaacgactttaaattttcgaaagcagacagctttcttcctctaccgttcatcttgatgtatatgtcatcgtctaaaccgtttctttcatccatttgtagaaatgcaaaggtaatacctggagttgccgatacgaccaaacgattccatattgaatcaaaattctcttcgtttatcttcctatgaatgaatttaagtgttgccagcatattccttacacttgtgttgctgagccaggattggatgaaccagttttgattgacgatcactttatccaatgaatcggcatcgttctctttgaccagtttctccaaatgaagggacagcctttcgcaaaagtcttcggcatattctcttgaggcaaatctgatatttatattaaatttatttttacattgttttcttgaatacagatataggtaaagaagccaaagtgtagtaagacgctgttgtccgtctaccggtacaaaacatccgtcttcctcatatccgtatatgtagttcaggtcctgattggttttgagaagagaatctaagaatggcactatcacatcttctctgcctccctgtacatagtcacgctgtagtaggggtatcagtatggttttactgttgaatgactcgatgaaattcatagcttttatattttttcgttgttgaaataatatccgagcttctgctccatgtcttttacataaaaatcggcatcctcctgcgtccaggcattaagcgatagtttgttggtcttgttatatgctttggtgaagacctgtcgtgtgcatggagggatatagcgaggtgtgagtgagctctcgaatttgtcgcttttatcggaaatgccatcggcaacaattatatatctccgtttgcgaggaaataaggcattatgataactgcggttagtgctgctgtctagaagagtaagattcccaatctgcattttgtctttcccgtcaggagcgttgtcttttatagagtccgttttatcatcgtattgtcgcattatggctgtatacaaacggttaaagtcttcacgtttttcacttgtactgtatatcatttccagctcttttattttactgttttcatctttggtgtattcattgcctaaatcttgctttatgctttctagccaggcttttctgtctgcagaatttctgaagtcggaatctgtattcgatgaaatgtgttctatgtcccatgactgcctgtgaagaagctcgaacgggaacttttcatactcattttcgagacttaaccgttcgtcttcatgcagctgttcaaatcgctggagtattgtttcgatgttatgcatcaggaatagaagacgtaaatcttttttatcgctatagtaactgtattctgtaatggctttatgttttctggtaagtatagtcttgatttcgcttcttagtctgttgataaattcagaatgagtaagttccctgttaagtgcaagccatcttgttatattgttgataggattcctgtttgaattatacgtgaggcccccaatgtaatggtagctgtagatgttatcatacatgtctttcaatcttagaaaagtatgtcgtacagctttccatttctgcgataaattttccttcttagagtcattgaagtaatttctgaacgaccatcttgaatcaatgtcatagtcgctttgtttgcatccagccacaaggttgaacaagaaatccatccttgtttgtccttcccgcagttcattgccgttaatcatataccagaaatggtcgttctgcaagtcacgttccattctttcgaatatggcagcagcctccatccgttcaacttgaggcagtcctgaaacacggttgagcaacagagccttgataaggtctgtatttgtcagatgtatcttgccgctattcagatttctgaaagtttcatattgtctggctctttctacctcataccatattacttgcaatgacttctgatccttggggcgttcaagcaagtccctgaaggattgcttaagtttgtcatccaaaaaaaaatcagaaatataatgatatgctgtatagatataaaagaagtcgatattcttatccgctgtcttttcgttttccgaagcaatatttttcaggtattcacttcttgacggaatgttactgtcgtcacgatcatattcaaatgtgtaaggttcattaccgtacaggtacatgtgtagaagatatagggttgtaagtctttgttgtccatcaatgacactgtacctttcatcgcccaatggtacaatggccaatggttgcagacagtacactctttttgattccttattgcatgatataaattcacgcaaatcgttcagaagttcttctacatttgatttagtccatttatatccacgctgttgatatggtatatggaaaatctttccttttaactccgaaaaggcttttaaatgtatttcttttttatttatatcactcataatgatatgatttaaaggtaaaagttttttttgatttataaaatctccctcgcaatccaggcacacgcttcggcatcggcaagggcatgatgatggttcttcagctgatatccgcaagcttcggctacagtgtggagctggtgattgggcaaacagggtagagccctgcgtgaagcactgagtgtatcataaaactcatagcagggataatccatctgatatacccggaacactgctttcaggcatccttcatcaaaaggacggttgtgggctaccaatggcaggccttctatgagaggttctatctgccgccacacctcagggaagacaggggcattatcagtgtctttacgtgtaagtccatgtacctgtgaacaccagtaattataataatttggttccgggtttatcagtgagtaaaaagtgtctgttatttctccgtcccttactatcactatgccaacggaacacactgatgagcgttggttgttggctgtctcaaaatctattgctgcaaaatctttcattcgctgatattatatttgttatacattcttttaatcttttccgccagttctttacgtagccatgtcggagcaaggacttccagatcttcaccattccaaagcaactcctgctgaaaatcaaaagtcggacggaggtagtaagtgaatatactgtattcttcattacattcggtttcctcttgtgactcatgaagtttcaggtcgcgcagatagtttgcctgtcctgcgctgacctttaattttacgtgttcttttggaatgttattgtcggctatgattccaaagcagccgtcgaagaactcttcggctgaccaaccttcaggcattttaaatgtttcctctctcttttgcagatacgtaatacggtcgaggcaatagattcttggtccctgtttgtgataataggtataggtactgcgtgccaccagataccatcgctgacgaaaaagctttacacaaaaaggttccacatcaaaattattttcttcgtctttccaataactgtggtatgttatattgagaatctgatttgatttcatcgcttcaataatcttctgaagatattcctggccagaagggacgtattccagcaagattcggtcttttatgctttggctctcgtccagcgcgttgctcacacagaaggtgttgtaaatccatgaacggagaccattcttgctgatgtcctctttattcataatatagtagcggtatttgcccttgccttcgttctcaataaatagtccgaacatatcctggatggcatatctccagttgtcgaacgtgcgtttgggaatttccactccctcactaatctcactgtcaagccataggctgttaagttccttaaaagatattctgtcggccttataaatggtatctataatccaaacgtatttacttaataagctttgtgccatactattctgggttttatttatggcaaagttacttaaaacctacgccaaaatattgcgtaggtatctttttttgatagaaaatagaaggttatgctataaatcggcgtagcttttaatcaattttgtagcgtaaacttcaaaacctttcagaaatgaatttttcttcaagagatttcgtagatacagttcgcaatgaatcggatatctataaattgcagggtatgttgcggagtgtggaaagtgctgtcaagttgcatgttggcactgatcctatggacttctatctgcgtcacgttggcgggcaggaaatgaggactgttgagagtcttgtcatgagtagaaaactcgttttggacaaaatgtttcaggccactcaacgtgagatggagatttttgtaaagcagaacaatcgacttctggatttgactaaccagatgtatcatcgtactgctcagatgtatcgcatgtcgttggccaatatgaacatgtatcttgatggtgacgattgtgatgtggaaggcaagttggtatattcatacaatgactgcgactcggtattgaaatatgaggaggataggatttaccagtctgattttgactatatgatagaattggtcagtcttttgatggagaaaagcagacatcgggtggcagagatagaaagtgcaattgtatcgtacagacctggatgtaacccttcgatgacagatgaggaactggactgtgtaaatactttagacgacggagaaacatgggcagaaggatgtctgatgaggccagaactggattcaatctgtatttgccatgcagtgcacgacatttgtacccataaggattattccataccggatttgctgcgtatggatgatttctttgtagatgtatgtattaccaacagtgctcgtaataaaactgaatatgatggagaataatggacaatcaatggcagaaataatgaaagacctgtatcgtaaaagttatagggaggctgccaaagtaatagtggcaggtggacgtgacttcaccgattatgagtttatgaaggaaagcctgggacatttgttcgctcaagaggatttctgtggtgattctgatataaaaatcatttcgggaatggctgatggagcagatacgcttgccatccgctttgccgatgaatttgaactgacaaagattcttttcccagctaattggaagctgcaccatcgtatggcaggctttctcagaaacgaagacatgatggaaatagccacacatctggtggctttctgggatggtaagtccaaaggaactcagcatattattgagctggctaagaacaagggcattccttataggatttttatctataatcaaaaataataatatcacaatggatggagcgaagaaattaacgggattagaattagacaattatcagtaccccttggctgatgtttcacatctgtctgaggaagagaagaaggaactttttaaacgtggaatgtgtattcctaagcaacttaagtctgacgatgaatttgaacagtgggtttcactctatgccttaagggaggctcaggatccttatgccttttcttctgaaggggaacaagtatgcttagatgaaaatgagaaggaacatctcatggtggatacagcatcgtatcatcgtgccatgtggtatcataagaaacgtttcagcgcttgggccaaggaggaattacagccgttgattgatgagttggttgaagccgcaaaaactgcccctcaatatgactggcgctttctttacgagttggaatattataagttgcgttgtatgagggcgtatttctctcattcattgattgttgacggaaatggaaatttcggttttaataaatggattgacctctgtattcttctgttgcagcacattaaagagaatgggattcatatcactgaaaaccagcttcagcatatgaatattcgcaatgtaaaggatatagtgagaccatctttgatgagcaattatatggatgtacactcatcagttagcaacagatttcaaaaagatcaaagagcaatttatgaacgtgacatttatatacgaaagatggaaagactttattataaaatacgactgaataagctgagggaatggtgggagtaatagctactcccggtaaaagccttcaattgaggatgagatgcaaaacggcttttatcctcatatttgaactatctgttatagccattccaaagagcatattatcgtaacccagtaattcccttatttttattctgaagttttccagttcctcatcggccaatggataacgggagggaaccgaaagatagaatatggcattattgtatttctttagttcaatctgttggtattttataatggatgtgagaatatagtccaaacggccctctacattggatgttactgacctgtattcatatctggtgtcatgttgaacacccaataaaaaggcaacatccttttccctgaagctgctgccgtttactgtcagctctgctatcgtcttttctcgctgaatcatcttctcctgatattcctgtctcttttcctacctgtaagcgcgtttgcgctttgaacggttatgctttacgttaacggacaaaggatgtttttctgttatgattctgcacctcttccccgacggaggcaggtaagcaattttaggctgcctcattcatcaaattaatggtgaagtgacagcctactaatcgtctatagaattacctccctctatgaaagtagtgcgtctcttcttgtgcgacagtttccattttctgttcctgttttccagtaatggacttgacatcagcagtggcgttatcaggcaatccgtaacgggtgatgttctgtctgacttcttcagcagtgactttacgcatcacatcataggttcctccaacagacgggttatataccacggcatagtgttcgttctccaccaacaggtcatctccacggtattttgtaggagacaggtaagtgttggacaggtctatggcatcaccggcatcgtactcaatggcttccttcaatagtgcctcataatcgcccttttcttgtagcttgtcaagtctgtctgtgtcttcacccatttgaaggtaggctacagaagcatagtacacaggctcttggctattactttggactacttctatgttttgttcctggtcaattttctgttgcatggcatcaatacattttgtaatcatacttgatgcctttttcacatctgtcagtgtagttttgatgaattccggagattcattcaagctgtcaagccagcttttgaggtaactggcactgtcttctttcagatgcttggtcataccatagcgttgtgcaacgagggctgcacttagctcggccacaagctcttcccgggcatactccttactaccaaaggacgttggctgtagtcttcccaactgattctctgctcctgtggaatgggccatctcatgccccaggttggtatagaatgactcaccatccttgaactgctttttctcaggaacgacaatctcattctttgaaatgctgtagtaggcattgtctccgtaggtaggcttgatggggcatatccattcgttatcctttatcatccggtcgataggagcaaaggaaaaatcctcaccttcagattgtggacgtatctgttttccttcatcagcaagtttcttatacctcaaatccgcaactacgcgcctaatatgatacagaagcgaaaagaatctgcatcgttagtaaaaagggggcacagtgcatcgaatgtcaccataaagacatataaatgccccttaccccaccatgcgacttgaggcaatacgcaaaatcacgactataagttgtcggtgttatccaaagtcattctggaacacattggcataagcattgttgcatgaatagatattcagcacatacttccttgatgtcctgacccatttggctggcacagagatgaacttaaagacaaacgtcttgatgcggcttgttgctttgagtccgaacctcttcacgtcaagcctcgccatgatgaatttatagaagttgcgtatgagtgccataagcagaagaaacaccgtgttttctcccataaaggattttggaagcctgttccagccgaatccgttattcatatcatcgaagatgcgttccttccctccacggaggttatagaattcgacaatctctttctcggaagactcgtagtcatttgtaaggatgcagcggtaggtgtattctccttcccacaggtcgagttcgccgtctatccgcttctgtctttgaatcacaagacggtatgccttccctttccatttctcgatgagaatggaggccagctcaaactcaatgccgcccaattccactttcttccaacctctgagggcaaagatgtcattgtagagcgaactgcatcggttagcacggatatagaaggtcttgcagtgtttagcaatctcttccactatctcttcagaacacgagccgcaatcagctctgaaacggttgataataagcttgttttgttcaaacctttcaaagaacctcttcagcgtgtccttctggtggaaacggacatttgtgttgccgtcgctgttctcaatgccgacaatcaagttgccaataaccgccacgccagggcgataaccaaggaacttcttgtatgtaggcttcgcatcaaacttctcagcctctatgaactggtggtcgaagtcaacgtcatacccctcgccctctttcagctgccctgtggacaataggcaattgaggagcagtgtattcagcttgtctgccgtgttgaagtcgtaggtcttgccagtgtcggatgtgtaggaaatgttatcctgggtcagttcctttatggctctaagaatcgtgtcggcactgcatgtgcgaagtgtcggatgaagcgaaaggtggtacatcagatgagtggtgacatcctcgatgcatgagccgccacaaaaataaacgctcataagcgaacggatgatttcgctgtattgataaccatacagcctgcatctcataccgagggttgagtcgattacagatgagagtctggagtcaaattgctccattattgaaaatattcctccaaaaggagtgagtttctcggatttaattgctacctttgccatgtctgtcgggtttgatacatattttgatttgcaacactaagataggtgaaaaatctgacatggcaaattcctgagcaactttttgttgctcaggtacttaaaaagttatatttgtaatagtgttgcggaattaaggttatataaatcaggacgagcttcctgaagattggtctgggccacattgaacacgttatatacctgaagctttggatagacgttgtagcctttcttttcttcttcactcaacagtttatagtcatcgtatttaattttttcttttgtctctttatcgacaacagtgaatgtcgtgatgaacaccgggaaactcttttctcctttcagaatggaaacctttggcaattcctgcccattgttatcctttatttgctgacggactccctgcttgtctttggtatagttcagaccggctacacggtcaaaagtacaaaatacaggcagtttatatccctgtttctcacagtgcatcatgagtaagagtgcattcattccattgtattcgcggccagaaagatttcttggccaagagatggatttatctgtaaaccaaggcttcttccagtcattctgcaaagtcttgattttctcaatcattaatgttgcccatttgtttatgtcagtttctttcatatttatttgataattagagttcttatcgaattttgtacaacataattttggatgctcgtttatattatatagtattactcatataattataagagcatgttagaacaaatcattatccgcaagtcattccttaaaaaacatttggctgcaccattattaaaggagcgagaatactttctaactatgaaaagtaaggaaggattgtcccggctaacactattggggtgggctgggtattcgctcaagtttatccaatatttcgatcttcatgatggcgaaaagagaattgtgtcacttgatgatgtcgttgaagctgcacgtcaatggtcttcacccattcctgatcattatcattctcggaaacgtcatgattgcccttcctcaagaatcaaattcattgagatggctgttgaattcttactatacgtaggtcttttagattctcgttaccaagacgacatcatcaattatctcgcagagcgcaaatggcacagagtcagactgattgccgctcccttttataaagagagaatgtctttcttgatggattgcaaatcaaaaggttttaaaagacagacacttcagctttatgcacagtatcaacttcatctaatagagtatcttgatttaaagaacttccgtattgttaccaatgaggaaatctcaaatgcagcaaaaaaatggcaaaacctggaagacaaaggttctcacaagaagaaaggcaccaagtctaattatagtttcttcatctattttgcaaatatgtggcttaaagagctacatatgctaccagaatcaggatctccttcaatatcagatatacgcataaatgaataccttaatcacttggcatacaggagatattctcatgcctatattaagggaaggagatatatactcacctacttttacaagataatagaaaaggagaaccaggaacaccctttaacattggaagatatagataaatacattgaatactacacgattaacaaggttcaacgtaacacgctgaaagagtacctgtgttgtattcgtgtatatcttcgttatgcagtcgaaaaggggtggtgtattaccgacctagataaggcgttaatcactcccaaagtatatagtgaagaaaatctcccttctttcttgccgtggaataaagttcaaaaactgttacaaacagtcaaagaacaaactggtaaatccgcatcgcgcgactatgctatttttatgttacttgctatgtacggtttacgttgtagtgaggtggcaaacttgaagattagcgacatcgattggcgtaaagaacaagtctatattaagcgtgcgaagaattgtcgaccacaagtgttaccacttctacataatgtaggagaagctattatcgcttacctaaaacagggaaggccaaatgacataggaagcgatagcttgttcttttgtacaccagccccgatacgtcctatatcttgtacagccatagcttccgtcgtatataggtatttgaaatccagcgaaatggacgttaggcacaaaggtccccattgtttacgccatagccatgcaactttcttgataaacgaaggacaaaccttaaaggatgtcggtgatttactgggtcacaaaagtatggaagcgacaagaatatatgcaaaagtggatctcaattcacttagagatgtttcaaatattaactggggggagcttctatgagtataaaagaaactgttgagtcatttatcaagtttcgtaggtctattggtcgtaaggatcagagtacaacttactctttgagattatttgctaagttcattggagaaacaacagaattaacttcaataacggaaagcgattgtaatgccttcctttacagaaaaggaaatgtcatcaccagatattggcattctcagcactgcattctgaaaaaactttttgagtgggctttttctagaggactcattcaaaacatacctattcccgtttttctgcctaaagctccagagtattatcccgcttacatatatacggatgacgaactgaagagactgtttgattgtgcgcttacatatcgcaaatatagatcatttgttaatgagccaatatgtatacgatatatcttgatgatcacgtatatgcttggactcagaataagtgagaccttatccttaaaaataaaggatattgatatggataatatgtacgtgcatatacattgtagtaagttctacaagtctcgcttggttactttcaacgaacaaatatcaaaattgatgcaagagatattacaatggcgaagtactcaaatgtccccaatggtagaggatgcatatgttttcattaatcagaaggggaaacctgttaattttgtatctttacatcagatatttgcgaccattcgtaagaatgcaggtctttatttccctgatagaggacgtcatcagcctagaatacatgatcttcgccatacttttgcggtcgacgtccttactaactggtataaatcaggaaagaacgtacaggatttactgccgaagttgtctatctatttgggacatcttaacgtgtccttcacttccgtctatctaacaaagacgccaactttgttgcaggaagcaaacaaattgttttatgcttataaaaacacgaacaatgaagaacagaagaattactgaaacagaatatcttggctattggctaagaccattcctcatagagtacttaattgtcactcgaaaccttagtcgtaacactcagatgagttatcgtgatacattccgtatgttggtatcgtatgtctctacattaataagtattgcaatagacaatctcaaaatctcggatattacgactgacgttattacgaaatttcttgattatctggaaattgagagaaaagtttccgtatcttcaagaaacaatcgtttagctgcaataaaggctttcgcaaagtttctggcgtggaaatctcctgaacatatagattggtgtcaccatgtcactcttatcccttcaaagaaaacggaaaaacgcatgataacctatatggacaaatctgagatcgaagccttggctgatgcaccattgaaaacatgcaaatatcaagggataagaagtcgagatcatgtcattatcctattcatgtataatactggcgcccgagtgtctgaagttattggtgttaaagtgaaggatgttgcgatgccttcaaaacgtggaatgccaatggtgacattacatggcaaggggcgtaaagagagaatatgtcctttatgggaggatttctgggatttactcaaacaatttatagacaacaagttgcctgacgattaccttttccttaaccgatacaatcagcctatgagccgattctgtatttatgaaatgataaagaaatactcacaagatgtaatcttaaatcatccctctcttgctaataaacgcccatctcctcacgttatacgccatacaaccgccactcatctacttaattctggagcggatattgatatggttagaaattggatgggacatagctcgattgatacaacaaacatctacgccgaaattagcatggaaaggaaattagaagttctcaaaaaatgtgagcagtccgtttccgatacaccatcacgaaaatggtctgaggataaggagttaattacattcttagatagcctctaattcctccaaagatagaattatgttgtgcaaaatgtcaaagaacgattgattattaattgtttagactaatgcccaacataattctatgtcagacataaatgattttatgttgaggtcaacataagatcatcatctctgcgaatttgtccaaggccttatcttcactgctacggccatctgaattataaatctttttacctgtcatagtcattagtgttggtaagagttagagcttttctcccaaagagagcattcgcttatgcggcatgtaaggtcaagtctgttattgtacacacctaattccaaatcccccttggcattgattccggcttttggttgcatccatgcttcttttcttttgtcgaattgcataaagcgtacccaggtataggtgtaattatctccatccttttcgctactataagctgaaaacaccgtaaaggacttaccatttttagttgtcttgtcctcaatttgtttgcctaaagtacctctgaactccattgtaccgttaatgccgtcgttattgcctgcattgaatgtgttaataccagttgcagacaggttaaggtataatgcttctccctttttgtggaacattagaataccggctacttcaatgcgagtcccaacttgaattggtggtaactcagataggttgttacaggtcttggccacactgatttcaactgtcttgttaattcctgattttgccggaataacgatattgataccgaatgatgcgaactgcgtaccttctttgttagcacgcatttgtgcctggcgggaaacggtgccacacacggttacattacatttaatcataataaaacgaattgattgttatacttaaaaagcaaattatttcaactgtacagactcctgtctgccttgttggatctccagattgttctgatagttttgtgacatctgcagcgtgaccacggcagagttaataacagaggcgatgctacgtcgtttctcatcatcgttcatcatggtactgccaagcgtctgttggatcttgtttatttctgcattactcagttctctgttgagttgtacaactccattgtctgcatacagattgggtttaccatcctgcaggcttatggtgcaggtcttataggatgggaggataggagtaaggtctatgcttttactgacagctgcagcagtagccttctgcatcttttcctcctcacttgaattatctatctggagggcaagagccatgagtgaagtgaacatagtcatggccatctctattacaggatcagctataggcatattcaccccactgtcttcagaggacagaattttcttcatccactcatccggactcatggctgtatctggctgcacattggcatcggattgacttgcactcttgtattgcgcagtcagatcttttccgttactgagaacctgtaatgagatgttccctttttgtgaaatctcagcaagatatgcagccgggtcaatatctctttttgttccatctgtggatatggatataactccaaaatgaagatgttcaccagtagtccgatacccagtgtttcctgaaatgccaagcttctgtccggcagcaacttcatcaccgatcttgacggatatactgtccaggtgcatgtaggtacattgatatttgctgccatcgttcctattgtactcaactgtaacagaccgtcctccgtttgtattggcattgctgttcacgttgacaacttttcctttatcttctgttgcaaggactgcctcatgatttgtctggatgtcaatccctttatgcaactgggacttacttgcgtccaaaggatcctttcttgtaccaaagggagaagtaaccagcataaactcctctctctttaaagggaaggaatatttcttttcttcagtatcctgcacggaaacatcatcggatgtggcttgacagggattgtcagcagttccaaaggatttacccagtgccttcatttcctgcattaccatctggtcatatttttgcaatccgttcttctcgataatattctgaagggttgctgcatattgtttgcttgacgcatatcctgcatcctgtaatccgtttgtccatcctttatagtcatcaggtgagagttggaatagtccggcatatcttccgttccttttcagaaactgagaatgatgctcataggaatctcccacatttgcatactggcaaaacttttcatttggacggtcatcggtatatacaagatatttgcctccgttctcaatccagctggatgtggccttgataccaaaatggttgtttcccttacgggacagttcactctggccactggcactttcacagataccttgtgcaagcgtgacagatgcaggtatgccatatctgcgcatctgctccatggcatactctgcatattgttggatatattcttgattctttgacattgcagttacatgttatctgtgcattcttgaagccttgctctcttcctgattggcgggttcacttttctgtctttcactaatgtctttcccttgccgggtagtttccaactgatcacaaatggcaattctctcaccggcacggatcatctttggaagataaacatcgagtgcatggtatggaaaaccggccataaggagaggcttcccttcagcatctttggtgtgattgctcttactgagagtgatgccgagtattttggcggtcttttccgcatcctggcagtaagtctcataaaagtctccacatctgaagagcataattgcatctggatgttttgactttaactcatagtattgtttcagcatcggagagagttctgcggttgcctttgattcagtcttggaactttcatccttgcccttattccctttggattcgaatgagccaagtgattcgttctgtctggtgttctcttccgtctgctcctcatgtacttccgtttgctgactggggctctttgactgggcctcctgttctgatttgtcagtacctaccgcaacagcatctgtacgatccttacggagcacatctgcaaaaaggcttaccgcaagatgttttttataatcttgcatgtcttctgccagccacatacgttgccattgctgtggactcacttcacgggctgtcaatttctcaccgttgattgtaggcatacacaatatcacactgggttggttctccgagcccttggtcttaaagatgttcacacggtctatccttgcgagttcttctgctgtcgcatcgcttttgaaaaggtcaaccttaatatccggattgttctgggcagccatatagtatttctgggccatatcctgacgtactttttctgaagcttcttcgtcaccttgttttattgtggtgaagaaaaggttcagatctgccttctcggggtaaacgctgaagctcttttcattttcgggcttcagataaagtgcccatttcccttcgtcattacgcaacatgagtatcttttcaaagtctatggcaccggagcgtttgacggcatcagatacatcgagcagtgtaagtgtttccatgttccacttgttcatgcggtttacggatatctccttgccgtcaaaaaaactgtcatcgggacgataccccatagaaccgtctatgttgtagaaagtgaccgtttcatagccctctttttgaagcgcatgttcgatgcgtcctttgttcattcctggaatctcattctcgactcctaatgaagcaccagaagggagaaccacatcagccatcttctgttcaggttcttttacaaccacgaactcttttgtatctatgttgggcaatgtcttgatttcatcagctacataatagtgtttgggaagaatgtgcttaatatccgctatctgattctgtaggactctgttgttgagctctacctcctcaccacgttcagccttgtgaaccatatctatagcattgtttacatccctttccagtatatccggcagatgcgggtcttctttaagttccctgagccagtaatcggtcatcttcaggctgtcaggagagagtttggcagagatacccaactcctgcagcttaactgctgaagcaacttcaattaccagtctttcctgtttcatggcatcctctgaaacctttccgttcttgacaaccatgccttcacgtgccagtctctgttgatgtcctgttgcagacataagcatggatacagcatcacgggcatagtcatcataatgttcataggatgaagcaggtggcaggaagacaatatctttcttactgtcgtaatgcgctacacctgtagtatcagtgcgtatatcaaccagattctttcgtgactgctccagaagattttcgacaccctgacggatttcattcgaagctgactctatatctgtacggtctttcagaggaccggtctcttttactactgtatcaaatgtagttttatcaaccatagggagtgtggtctgctcaatattgaaaagtgtgcgtacttcacggtttctgattcctttgtaatcctcctgcttatcagacgacagtgcttgatagtctgagcggctgattttctcgtcaggattgtgcttgtttacatactcattccaattataccaaaggaaaggcactcccttttctttggtctggacggactcaccgcgtttttttgcttctgaaaaaagtgtatattggttggtcttgtaaccgttctggtcactgtgcatacccaatatgatggcattgaaggcagaaatctgcaaaggcttcagatatagcctcggagctttacgaccatcattttcaagccatattccaccattttctttggctttattgaaagcattctcaaacagttcaacttgacgtgctactgccattttctcttgttggtttttctcttccataagtctgattattatattgttatccttttatctttgagcaagcggtcgtgcaactgtttgccgttcacctgcttcatagttttcagaagcgatttgacgcatctggtcattcttggccagtattgcatttgcaagtgtgttcagtggtaaagctccctgctggtaggcattcacaactttgtccggcaaagtgatggtgcaaggaaccttgtctattatagcaatcagacagttagacttaatctgaggattgacaattcggggatcgagcggttcatcaggataaatccgataattcacaggaccggttcctgtttcagggtgctgctgtgctttgaaatcatccaaagtctcatgtcctgccttgttcagcagattgagtcctcccataccgataagtatcattttcaggattggattcttgacgaacatacctgtaacgatactggcaatgggcatcatattgtccttcagattgattgacttcgtttttcccgtgaagagtcctacaagcatgtcaggcagcatggccagtacatatccgatattgtgtccaatgtcgctgattccattaagcccgaaagaggttagcaacccttgccatccgtccatattggtctgttccggttttggggaggtctgttcttctgttggttgttcctcttcgactggttcttcctgttccggtgtagtctctacagaagaagcacttgtctgtggcttttcttcttcctgtttcttcattttctcctggtcttgtctgtactgttcctcgcatcccggtcgcactattgaaggtatgtctgaacggtcttcctgtttatcagagaatttagataacaggaagtcaccgccgacccatgtggccgctgttttccaaccgccaccggctccacccatacatgctagatcggttacggatccgagaattatacctgtgttcttttcccattcagatgggttgtatctcttttcggcttcagcatccatatgatgttctaatggtgattttgcaacttcctgagggagatagaagatggtgttagttgctgccttttttaagatgtattcaatggatgagcgtggaatcttatcctgaatcatcttgtctatcatctttttctccatagcagaatcaacgatgatgtgctggagttgaagttctttcttgaccatttcaatataatcttcagccgttttcgagttccattcaccagtgtaacgtaaagaatgcatctgtgcctgtctggcagacattccaccatcaggaccaatggcactggccatcaatcctgcaaatgatgaggtgtgctctttaagctcatctgccatcttatcttgcagttcattccgaaccttgttcatgattggaataacctttgtcctgaatattctatcttgttctgactctgccatgagttgctgttttatatgattgataatttatatgccctttatagatttatctggttgagtaattgctcgcgtgtctgttctatggcattgtgatatacttccatctgtttcgggaaatattcttccagccattcatccttttcaatgttttcattgataaacttgattgccagctcacgttcaatctctattgcagcttctcctttctcactaccattgaaccatgcttttgtccaccatctgataccggacttatccggaaacacgctcaccatacggggaatatcaaagctttgaacatcaatatcgagttctgccaacggatcaataaggccactgtttgctatggcctgttcttgtgcttttttttttcgtgatcacttaaactggaaagaaatatctgatgacgcagtgcaagatagttcaggaaatcaccgataagcagattctgtacccgtgctgcaatcggtatacttcgtacgcccatacccaatggattagccatactggggatggtttcatagaagtaattttttgtagccgacagtgagagaatatttctcaaagtgaactgtgtatgttccggcaacgtgtaggctccaagactgatgtctttcatgtagtccggaaaaaaacgcatcatcagattctctatctccttgctgtccttgtcatacatggttctgacatccatatccagtgtcacaaattgtggtactgcaccaggttgtccattttgttccatgactttcaaattactgtatatcatggtcagaaactccagaggattgagttcttctcctttatacttgacctccatgtgaagtatttccccacttacggaaataacctgaccggccttgacttcacttccgtagttggccaaaacgttcgagaggtgtgcgtattttacctcgtagtctccatagcgtgtcacctgatagataccatgtacggcatcattcccaagtcctgtgatcttccctgttgcaactgctgaaagaagataatggttggctttgaaatccacaccatgatgaaaaaaaggttctcctgtatgcggatgtttctgtttaccgtagccaagactcatctgtacgtcacggcctttttcttcgtagggcatacagtatccactgtccgaacgaagaatcatttcctgtgtatattgcatattatatctgtttataaaatttactattatcttcgtctgccgccaccagtgccttgtgcaatctccgactgttgaatttcgtcttgactttgtgcagcaggtcgtttcttctcactggcaagtgcctcgttcatatttacattgtttcctatcatcatcatggcaagcacagctccagctatcttgcccatccatccgaatcttccaaaaacaagtagtgcagccactacaagtccgatgagactcagaccggagacattccctttgcctatattgctgaaaaagttccccatcatgtttccaccgttcccggagcaaataccttgcaggaatttgctcatgccgttccatttgctgtctgcactggtgatggcatcattgacattttcagtgagaccagttacagagtctttcacctctttcattccttcaccgatatttgagactgtgtctccaatcttttgtgtcgtttcttcgccaatgacagcatcgctgacaatacccactacgcttttgtctgtagtcagtttctcccaaccgatgtagcccaggcttccacctatggccgcagacttggtggcacttcctaatccttttagcgtttgctgaggatgtacgactgcaccccctgccgatttagctacagcttttatagctcttcctcctaagctgactgctgctttcaataatgctccccaacccatgtttaaagtttgattgttaaattgttatcctgaattatctttttacctgaatatttactttggctttacgtttctcttccatctttccttgcatttctgtacaatattgggcttgtcaacctcacttctgccattgtagtctatctccgcccatatgtcagagagtgaagtatatttaatagctctcgtaagccttttgagcttttgattcatgagtttaagtttcgggcggatggaaaagagaacttctagtcgttccttctctgtcatcttggtgtcggagaggcacagttgccggatgtcattgactatatcaacactattcatgataagttctctatagattttattcctgtttgaagacaatgctactgccagggcatttcctgtctggtgctggagctggtcattaaaagttcccaggtgtttcacgagtcggtctatttcatgatagaatccatatatctgtgccgcataactgattatgctatgaaagttgtccaaataagtgttgaactccttttgcaggtcagttactccttgtacctcttcctttatccacagatgacccgtagattccagaagcatcatttgttcctgctgcttcagttctttttctgccttatttgtgtatgccagaatcattccagccaaaacagggtcgttgccctgagcctggagaaaactcccacccagcctttcaaaagggagggtgagagaaataagcatggcaaaaaacagcaataagcgtttcattgtgttatcctgataatcttttatggtgttactattcgtgcgcatctatgccatctgtctaaagcttgaccggcaatctcagcggtattcctgtctatcattcctgcagtggctctgttccatacatcggccattgtgtaatagcggatgctgatggagagctgtgaaagtcttttgttgaattgtgccagacggtcattcaactcccaaagaatcttactgcgttccgcacctgtaagcatattgcttgctccacctttggctactgcatctttcagtatgctgtatacagtgatgagttcggtcgctgtttcgatgtaaagattattcatactcattgtagccactattccatgcgggttttgtgatatggctttcttcaaatcacaaagattaatgaatatccttacaccgtcatcatagagatgactacaggctttgagggtagaagcgtagccagacacggttttcaggtagctgttgtactttctctcccattgccttatctgagtaaactctgctgcaatggtattttgtagtagtgccgtcttctgctgatcttcaatctgattcttgatttgactgttgataagctcattaccttcggctaaggccacatattccatcggattgctggaaaccaattgggcacgaccttcaagacagaatagaaacaaggtcagaacaatgaccgagataatcatccatctgctgtcgtaagcaatacctttggaagtcttggcttctgacgatatattatctgttcgtgatttcatagatacctttcctttgtttgttatactcaacccgtttacggataattcctacaacatcaatccgctcgttgattccaaatatgtccagtttgggattggaacggtctccgctgaaaatcgagacagtcttcaatccgaacagctgttccactataccacggttttcactgaagtcaaccaccctgtagagttcaatgtagtcgctcttcctgatgagtacaccatgttggataatcagttgttcggacgtgatgatatagctcagtttgtgtatatatagacaaccgtagagcatgatgcacgtcatgattgaacccagtaccacaaagggcatcttataggtgatgctatcgtgacctgctgccaagaacagggcacaactgataagaaatgccatgccttgtgagataatgtattgcccccaatgaggatgcaatgtgattatgctgaaccgtctgtttgtgtctgtcatactgtttatcgttttagtccgctcttcttggtttcttcattttcttcttctatctcttcggtgagagaaacactattttcgtcaaaggctgtctcaacgacatcggtcattgagtattgcttcttctccaacagctcatcattaaaatccttataaccttcagacggcagttcacgtactattcctataggattcaggtcttgtccgtcctgtacatggagtttttgaaacaggacctgcttaaactcctgataggctttgttcattctttcagccgcttcctgcttgtcttccttacacaaaaagggagaataatggtattcccatgcctcatttcttgctgtgtcataagcgaggtaaagcttctgtagtacttcaggcagctccgcatatctgtcatcgtcaatgtcaagcagctctttggtggatgtgataccttccttgaaactttcaatgaagcctttcatgtccgatgagactgattcaggatgcaacggattcatcttttgtacgatggattcaaagttgaagacgaactgttttcccgccaggtcgttgtcaaagccaagatggaaagtagcaccgggagcagccttgaccaatccctgtatctgtccgtagctgggatttcctccggtagagacaaatacggcagacttcagattctgtcttgcattgtaatcaagtccggagtctttctgcattctcaactggtagaatgccatggcatcgtatgcactctcaaacacatatacatcttttgcatctttcagttccgtgtctttgggacttgccatccataggccttcacttgcatttgtcccggctgccatgccttttcgtgcagagccgtccttacgtggatagcctctttcttccaaaccgacacatttctcaggatgccccggtatatacatgggaaaagagaggttcttataacttgccccattgtctgcggccttggaagcaagaaagaagttacggtgaaaagcacaacgtgtagcaaaatcgattcctcttgacttgaagaaagcataaaaaggtttctgagagtcagcttcatcaggatgaaatcgctcaatcttataatctttgatattgaaaggctttgcatcacgggtaggagcaagcacattctggttacgttgctccacaggaatattcaaaagccgctgacagactttgtgaacaagagcagactctttcattccttgattgtattcaggaaagagattcgggtgttcccaaatgaaggatgtgacagaatacagctttatcgttggaggttggaaacaacagtttttattgggcatgacaatgaatttgtcacccctgattctgcgtccatcattatccagacgcacataggcaggatagcgcaagccgtcccgcttgtgaagcgtataacctgcatccgtcaacacgtctctgatattaagacggttgcgatagtcttcaaatttctgctcttcgttcattgtgttctatgatgattgttaagttttatctcccatgtcctaagccgactccatgctcagctgcattaagtccggcatcaaatgctcttgatgcaagatcctgtggtgaatccacacctcctttgaaatagacgtgcggaccaggtgcatgatggtgctcaacgaacacagccggagcataacggtctcttccgagttctcgcataacggtaaggccggcaagtagagcacctccaatcatggcacctatatttttcccatgacccggcgcattcttcatgtccacttcatcaaagatgtgagagaagagtttcatacgatgatagtcatctacggccatgaacttgtcatactgtttttgggttatctcgtgactgatgctctcgccattgatgacagcggtcatacggaacatggcattgcctttctcgtctttctgaatttcaccttgttcgttgcgtacaggctcaactctgatgtcgtccacctgtacctcacgtccgtttcttccttcccggaaccatcctttatcttggtttatatcataaaggctgttaccatccacatgagcgacgcttcggtcttcatgctctgcaatgatatattcatttccctgagtaagaggaagcgcgtgttctgccacaacttcttgtctggcattcagttccgcttctacttcgggagtaagttttaggggtatctgctctttggaattgagcatgtccatcgtcaatttatctgagaaatcatttatgataacgttgttgatgatgtccagacggttctgtacaggcacattcttgatggaattgtctgtaagccgggtaacttcttcatccgttaggtcgtaaacaagatcatgttgtgtagcggtcgactgaatggtcagggttttgctgttggcatcaataatgactccatgagaagagagacattcctgccacttttcgttgctaaagtatacgtctgaggtgataagttccttgtatggttttgccggttcctggggacgggtacgtatttctacaggtggaatcactgtttccaaatcagcgagtacatcctgtgaaggctgctgtaccatgttctgctgtcctcctttataatagaagccatagcctccattgagtaattcacctggtttgattcttccatcgggacgttccggaaccataggggttccttgcatgaacatggctccaccgacacggcgcatgtggaagccttcctgattgcgtggtgtccatcccaaaaaacgtccatgaaacggatccatcatcataaaggcacggcgtttgtcccacggcagtctgccgtattcgccaacaccaatccggtagccgtgaagtcccatagccacacgaccgttggcattacgggcatggacaaagtctctcggtatatagaagtctttcttcactaaatcagcaaaggtgttataggcttttttgttagccgagtttgtaccccaatctgccaagtctctcatctgtctggcactgatatgataggttaggagaggtgagtcatgcccttgaaccgacagaagatagttttcaccttgtcgaataatatgtgcttgcataccattgcgacggagaatatcctgcagctctggcgacaaatctctacctactgatagtgcatttgatctgattgacatactgtgattgattttaaatgtttattattcgcctgtttcaacaagttcgcctttccattcgataaaatcttcggctgattcttcgttaactacaaggttcctttcattacagaattcggtgtattcttcctgccattccggtgagtggtgattgatgtaatcgagccaaccgtattctccactctgtactttctgcacaagctcgtcttctggatagtatttgatattcgccatattgaatttgttattgatggttgttactttggtttatcgctgcatcatacgcataccttgtttcttctgctcattccagatttcttcagagtagtcctcctcatggatatagtcaagattaccattttcgtccatggtccaacaaccgaaaattccgaagttgtatttgtcccattcccgtttagcttctctgcgccaaacttgttcattacctgcggagagacggatacccgtatttgaattaagatcgataccgatggaaatctcatcatcgtcttcaatgatagagagaatttctccgttttgtagtttctgcatctcagtactcgtaagatgatatcggtcggtaaggtattgaatgttcctacctatgactggtgtcggcacgctcagtacctgtttgctatcctggtcaagctggaagaaacatttggtgccaagctcgtgccccgtttcgttactttccaaatgtccgatgatgggtttgcctgcaagaaggttttgcttctgctgctcattgaatacttttaaatcatactcgtcaagtttcggaaagaagagaacatctacattgctttctggcgttcttacaaggcagaatcgtgttcttgcctttacttcttcaccatcatcagcaatgatgtgtacaggtaagactggagaatgccggccattgagaatattttgcaaaatgtctgtcggcagatcctcaatcatctcctgtgtcagtccaaaacgttcgagaatgccgtaaggcatttcattctcatcaaagttgtaaatcatttgttactttttttaatacgttattattttggccataacagtatttcattttcttatgaagtactttattaatagctaattcagaaacaaaaataaaaggtgtggttggagaaacggaagaatagacatattataccaatagttttatatttccttatgaaagaagtatgatttatcgccgagaatcatactattagcctaaataaagttagaaaaatcacttggagtatgtgaggtttatcccatggtaatagagatatgtaattttgtttcatggaaattagaaacatactcatgatggtacttctctcgtttatgccaagtaccacaataaaagcgcagtttaatacggttgggcgtttatataatcaacaagtccacaaaacaaaaaatccacaagagacaaatacttctcttgtggacaatttgatgttaaaagattctttgaaccatgcttcatcacatttaaatatggtggaatcatgccgggataatgtaggaccctcttcacaaacatctggtgatattcttcaatttttgaatatggcttttccattaaagaatattcagataaactcagagtttggaatgcgttattaccctgttacacataaatattgcatgcataatggagtagatcttcaggcacactacgaacctgtgttttccatgcttccagggaaagtagtgaagtctgctcatgataagcgttctggcagatacatcacaattcaaaccgacacctacacggtcagctattgtcatttgtcatcatctaaggttacaatcggacaatatgttaaggccggtgagataatcggggtgtctggtaatacaggtatgtcaacaggcccccatctgcacctgacaacaaaaaaggatggtaaggttattgaccctatcatcctcttaaactgtgtgaataaagttatgtacataaagtaacgtcaattttatgaatgtttttaccatcataaaaaccataatagttgcttcttagtccaacaattatcaaaaaaactccattaataggaagttttgacgtagaatatatatttttgatggaagcgacatctatatttgaaggttgaggattatcctcaggatgggtatgccattcccctaaataatatctggagcggtttgatactttataatcctcttctataaaaagatttgctaatctcgcatctcttgtgcagttgtatttagtagatccattaaatattgtacatggatcggaaacttttgctatacgaaatttagattcttctaattcagaccctgtaaacacaccaccaatctcaaatccttctttctgctgaaaagtttgaagtttctttaatgcagattcctttatttcaacctttatttttttataatctatagaggtattttcgtgatacttccggaaatgtgttccccttctattaattttatttttttctctattgcaatatttagatttcctacccatcgatagcacattgaattaaaaggttcttttattaggttattgataattggatatatagccgacaaaaaaagtataacatcatttcctgaataatgtgcataagccccattgcatccagcatctctactaataaattctgtttcacctctactgatgtattcagaggaaggtattatattatgcttatataacattgtatctttttctaaaatgttatccaaattaggactattggcaggatttatgtatactagatgtccagctattgcaaaaggctcaagccatagaataaatattggagtgcgtaaaatgcctttttttaccaatgacaatacatattgttctgacatacaatctcctacgcacatgaataatgcagaacatctattgaactcatttagatctttttctataacgttctctattgaattaccataactttttattaatgaatcaggccttttctctcgcagaaactcttcaacggaatgaactttactttgttgaatatatttcataccatgtaaatgccttccaatattttctggttgcataatatcattatcaacaagtatatattccgtattagaccatccacttaaaaaataacataagttacttccgatgcttccaagtcctataacagcaaatttccttgttcccaacttccttcctgaagtacgttggtctattctatcagaggaatatattttgccaatgagccgttgaaggcacctgttttttttctcaaaaagtgtaagttcttcaaatgcagtaagatttcgatggccttttctaaaggctggttgcaatggtatatagcatccaccaagatattttgtatgaagtagtggaaacgtaacaattacttttttcttcttgttgagaacttttttgaacaattttttatcatcaggatctttaatccattctaaaaacgttaaagggcttattgaatatggaggcgtataaggaatctcaacacttctgaggaataatgtttcattttcagagaagtaaggtttacgctttagataatgttcaaaatcaatatcaatatcatcgttctgtataattaaattatgagaagctcctttttccgtatatagagtttctttatatgaccaaaccttaaggatttgtgatgtggtaggtatatcaccataaatcaaccaatcatcattaatagtttgttcgtttggatatgttcctatccaataactatatatttctttgataaaatcatcttcattttcacgttttgcccctttctctatcaagcgtttagcttgcctaatgcattcacgtaatactgaaataggttgatctggagaataagttattccttcttcaagataacagagtcttcgataagtataatctatatgagggaagtagtcatacttcgtatcaaaatagaaaatatctggacattcatatggaaatgaatttgggaatcctatatatagttctattttttcagcaacaggagctactgaaatataggtactcaatttccaacactctatgtatgaatgctgtgaagttgttggaatctgaccaacaagttctacatcgtcttccttacttatttcagcaaagcaagttttaagtaattctttattatgcaaagcgactatttgtttttaatgttcctgatagattctttttctgagcatcttcatcttcgtcttttgctgttgagcaagagaaacgttcacctaagtgattttgccattttaaacaaccatctttttgattagatgaatttacagctttatcagcgtcagacgcaaaagagttcaattctttaaggaaaaaatctttgcggcttgttttgtaatgctcaaataaatcttctcctactgggaatgtagggcgataacaatgaaaaccatctttagcgctgagactattattcatttttacgagaacatcccttaatgctatgtcatctctatcatttgaagtgaaattcttttcaacaagaatggtaagtatacatcccgttggcattttcccttttccctgattgttcacatagtcagcccatgcttttacatatcgtacaattctcctcagttgtggatgttctgattttccattaaaccaattggtcgtttctcttggatctgaatccatccatggattttttttgtgagccattttgggatgctcatctccatctaccataaaatatgctggcaaatcaatatgatggttatctgcaaaatatacagttacgcatgggttattgtcttttgcaccctgtgttgtgtggtcctttactgcttcataaatttggttatgataccattgtacagtttcacgttcatcttcagacgaaccaataaaatatattccatcatccaaatcatatgcaccaagtccatcttcatccttaatcggattcagcaaagtatacatagagtatgaaccttgccaatgaaattggggctgaattttatccggccaattattcttgaagtaattacgaattttctttctaatagattcacgattttttttaagtgtatctcttcttgattttgatgctttaattgtgtcattaaaagcaataaattgttcgtgattatttgccatatttttagaaatataatgttttacctgtcgtgaaaaatctctctactttcggatccattttagcttttattgcagtagcattgccaatggactgaagtatttttaatgaacggtctgaagcattatccatagatatatttctcatatgctcggctgacagaggttcattagtgattctaacgtaattcatcgggaattttaatttcccatctaagaactcaaagagttttgtcatatttttagcttgccctattgaaaataattcaataagattctcgttccagtcaataaatgagttatagtttcgttttggggcatttccctgggccacctcaagactactaatagacaatatatcaacaccattaaatctctcatcattggcaaattgatataaaaattccataagtccgaccaaacttggattgttggcccatactcctccatctacatattgacttgattcaagattatgtataggtaagtatgttggcgcagcagatgttgcaagagcaacatctacatatgtctttttattatcttctgtaaattttttatagtcccttttgaaaactcttggcgtagccgtaattatgtcaaaagcaggaatacaaaggagattagaactttcgtatatttttttgtctttaaagacttcagctaaagcttttcttaattcttcattactatatttacctttatagcatatttgctttattttaagccataactttcccaaattttttttcctcttttgagcgaagatttttggccctttttctttgtaaaagtttacaacatcagacattgagatattagcagatgcagccaaggcaataattcctccagttgatgttccacatattaagtcaaattgttctgaaattttcgtgtcgtaaacttcttcgaatttagcgagaatttgtgctgaaaatagcccctttattccccctccatcaatacataaaatcttaaaaggatgttttcccatataacattatttataaataaataatacaaataccatgccaactcgaataatcttgttaataaatattttagtcaataaatatctattttatatgccagaatgtcagctttttagctgtttatttatatgccatttttgcactgttttcacatgttgtactcttttttattcctaagttcaagcggataatgcaacaggagtgagaatgatgacaatgagaagatacgaaaagaataatttttcagaggaacagagaaagaagatttctttcccttttgttcccctgtggaaaagttgtttctttgcatcttccagttccccaacattcagttgcaatatgaaacagctaaccgaagaacaaaggtataacatttccgcttatctgcaaagcggaaagtcaagaaccgagattgccaatcttgtaggagttcatcgtagcactataagtcgtgaattacgtcgtaatagtgataaacgtaatggcatttacaaaccggatctcgctcaggctaagtatatgtccagaatgcgttcacgaaagcacttcgtgaagtttacggacgacttgaaaattcaagtagatatactcataaagaaagatttcagtccagaacaagtgactgggtttatgcgaacaaagggcttggaaacagtttctcatgagacaatctaccagtatatttgggaagataaaaagcatggagataagttgttatacaagcatttaagaagacggggaagaagtcataagaagagaggtgcattgactaatggacgtggttttatcaaaaaccgcgtggacatagacaagcgtcctacgatagtagacaagaaagtacgttttggtgatttggaaattgacacagtcattggaatgaatcacaaaggagcactattaactataaacgacagggtaactggactagtatggataagactacttagcgggaaagatgccagcccgctaactaaagctgccatcgatgccttggaaccttttagagaccaaatacatacaataacggcagataatggaaaagaatttagttttcacgaagaaattgcacgtaaactaaatatttttgtttactttgcaaaaccataccactcgtgggaaagaggagccaatgaaaacagcaatggtttgattaggcaatacttcccgaagggtacggactttagggacataaccaatgaacaggtaatgcgcgttcaaaacatcttaaactcaagaccgagaaaaagattgggttacatgaccccaaaggaaaaatataaattattaactaacaatgaattcgacactgttgcattgtctgtttgaattcaggattctataaaaaatcagctattcaaattcaccatcagccactgttttaagaataaaatcattatcaaattcaagccttatttttgctctggatgcatcgccaacatatgacgtatagaatgaaaatgatttcatcccgtatggacgtatttcgtcgtatgtaacgtagccgtcatcctgagttacttcagtaccatttcctttcaaatacgtaaccacgtattttacatttggtatggtatattgggtattattttttacaacccctcttccacttgcagaataactataatcacttgtttcccaattccagtttgctatagttacattctcagtaagataagtataaaactttaatgatagcgaaataattgcagttgatgcctcagaatatttctttgaaatctgttggtctgtaagagtatctccttgtatatagccttttctctttgcgaacatatatataggatcatcagaaagattgcatagtccttttgagtcataaattacatagccgtcacttggtttcttatcgtctttaggctttgtatatatgataatgtctgactctgtatttttaccgaatccgttagtgaacttgtttgttaatgcaacactgtatttcttgtcttcgagttcttttacttctttcacgattattgtgtctgatttataatagttttgaaggtttccaacttcaggatatagttcaaccattttttcttccttattgtttttgatagcggagaaaaaatcttgtgtaacttctttagcctctttcttgtaaccacaagaaacaaggaagtttgctgatagtaccaagcatacaatagtagatggtttcatgataaattgttgtttatatgttttattcgcaaacatatataattgttatgcagtctatctgcacaataataaaaatataaaaagaggctaagtattttaatattatacatgccccttttgctgtaatgaaattataatttagtgtaaattacgaccattcatcatctatatcatctgaatgtaaaggtgttgaagtgtaattggtgatatttcccattattgtgtttagagcatcaatcaatctatcggctttattttctataaaaatattttcttgaacatccacaaatctgattaaagtctgtaaatcagcattgtctcctaaagctatagcaaacttatctgcatcattaaatgtctgtaaattacgcaattccattattccctcatcatagtcatcggttggacagccatcactaagaagtactatggcagtattttcattattagctggatatgtacttatgttttttgctaactcacagcacgctttacctaaagaggtcattccacttgcggttaatggcttccaattaaagtctaaaatattaatgggcttatcatgcatccaagtaacatcccttgcaaaggataagacaacaatatcaatgtttttgccgttaaacgccttttcctgcaaatcaataataatattttccattgaatcattcaacgcactgatttttgagccatccatgctgccagatgtatcaagtaaaatataaagtctcattattttataaatgcaataaagtttaatagtaaagatatgatgattgctataaagcagaatgtaagtaacctcttagaactggtaacttctccttttagggcgtttattgtattataaagatctttttctttagaatcaaattgtgtctttaattctgatattgaagatgacaacgtcctaagtgttgtatcaacagtattaaatcgttccgacaaattatcagcagctttaatatgcccttcactgagagattttaatttactgacaatttcatcatgttgattcttttgatttgtaccaacaacttctatttttgattttaaaatagttgtttcggattttattatactttctatattgtctactttacttacaacggttttgcttttctcttcataaccatcaataatacttttaagctcatcttttaatgaagtaaaagataaaatatgctgttctacagacgctttgaaatcatctgcaatatttttaagcataacctttaagtcggacgtaaaagcagtattagaatttcggaaactgtcctgaatttctttcgtacacgattttaagtttgaaagggtagaagatatgccatctagttcaagtttgaccttttcattaaacttggatatggattgatcaacttcattgttaagttttcctatgctattatgtactgaattctcaatagtattgacggatttgttacatgacttttcaaatgaagactgaattttttccgcaactgcatcaagtgtatccacttttttacttatgctcttaaatacagaatcaatctttattttaagtgtttcatcaatagagtcaacattctcttttatagcattataaactttgtttaattcagaagaaacctctttaaactccacagttaatgcgtgaagttgtgcttttgtaccttcatatgcatttacagtattagtaacttgttgtcttgcagattcaacattctgaagactttgctctaagttggtgagcattttaagaatatcttgtgcttccatattgggaatttattttatatacttatttgtgaatatatccatccatgaattgtgataacctaactctgctataatctctaaatcatcaagatgttttatatcttcgtcgattgctaaatttcgattgtgaatattaagatttgtcttaaaccgagaaatacaactggcgaagtcatcgtgattttttatctcatttttcaattcttgataaccttcaatatagcttttatcaagctcattcattagattcttattattaccgacttttaaagcaagcaggcagaatacgttaagcaaactgagagttgcattagagtctgtagttcctctacggataagtctgaccgcaccttgaagatgttttatgttatcttttggcgagccggaggctcctatcacatcagaatcaaccacacgcatgtatttaaataatatttctgcggaggatttttttccacggtctgtgtcatccaaaagtgaaaaactctcgttattgtctgtcatatatccttcacgtgcatatttagagttgaaataatagtatatttcatctttcaaatcttcgttgatttccttccagtcctttgacgtatcaattccaatgttgcagaaattacgaatatcatctatagcacgtttccttttgagggcaactttatcatatatgaattctgtcagataacctaggcatttatgaatctcattaagtccttttctgacgctggccttttcgacttcgttttcagctctttcttcagagtaatatctcatcagaaattcttttaaacgtagatagtaggatccgttcttctttcttgttgaaagaattctgaatgagtgtttactataatcttgagtaaaatcgtctattaggccaattatacacatacggtaaatagcctttgctatatcagcataactatcatcttgatatgaaataatggaaactacttctgttccaatttcagaatttagaaccgtttcaagaaaaccatttgcatggatatgttccgttggcttgtcttttttgtcgtttccgatgaaatattcaagatccacctgactcaacagatagtacatctttttcttctcttcgaattcacctttaaagttattgtcaaagaaatacatgactgtattatagtctgctccttgatattcaatattctcttttggtattcttatttgctcagttctaagatagtctctaagatcttgatgaaattgccatcctctcatacttttatcaacatgacgcaattggcagtttttgtactttgagcatttatccgaacagcgccatgtctgcttgatttctgtcccatcttctttaacaacgacattatctgtattgcactttaattttactatatcagacagcggagtacaataatctatatatctcggttcaatgctaataccaaaatcttcaagaatatgatgaagatcttcttccttaaaccatctccctttgattatgtcaagtggaaaactccaattcggatatttggggttgattcgagcaagattataatcagataaaagtatgacagaaagagccattttccgatcacgaccagcacggccagcttcttgaacatagctttctaaagaactggagtaattcatgttcacagtaaatcttacatttggcttatcgatccccatgccaaaagctttcgtggcaaccattattggcagcttattttctctgaatcttttcatattctccattgaatcattcccttgtgttacaccatcttgtgcagaaccagagaatgttcctacttcacatatttcagagagattttttgaattgacagaaacacttatcccactgctatttacatgaggacagaagataatgcctgcttgctcgtaatcacttttttgtgagtagaaatcgtctggcatatcaacgagtaaatgctgaccatcaacttcttcaaggtcctctctctcgtgaaatctttctaagattctgtcaattgagtctttagtttgaagttgacgaatataatcaggaatacgatatatgtatgttgacaagaattttgctttttgctcatttgtactccagacatctccaatattgactgcacttggataattactcaatcgtccttctttatcatagaactgatcttttttatactcaacctcaatcttttcaactttatattgcagttcaaggcggttactattctcataacgaacaattgtatcaggatctaatgtaaatgaattatttcccgaaagttcacgctctacgtcagaaaggacatcaaaagaggcggttgctgttaaaccgaacaaagagattgttccattttttgcttttacataattgtaaagattgcgtccaagatgaaggtacgaaaaacggaaatcctgtccccactctgaaacgcagtggacttcatctataacaccgtaggagaaataaacgtgaaggtcttccatgttctttagtctttctctaaattcaaatatgcataatctttctggtgacataaatgtaaatatcacctgagaagattccatcataagttcatgagaagcccgttcttctgtagagagttcgttattaatatatgtacagcaatcaattccagtacctagcaagccatcatattggtcttgcattaacgatttcaatggatcgataacaacagtaactcctggttgtaacattgctgcaagttggtatgtaagtgattttcctccacctgtaggtaagagtcctattaccccttttatctggagagctttattgagaataggtaactgccccggtctaaattccctttttcggaacattagttgcaagaaatattccaaatgctcggcagtctcttttattactgtatgcccaccatttacattaatggtcgttacaggttggtaaagaattcggtctgtggtgtaaatttcacgagaggtatagattgtatttgacgaacgtacgttgaaatagcaatcattattagccttgaattccgaaaattgaacatttacagcatcaactttctcatgtatggcaatatcgataaccatatcataggttttttctctattagcctgcttattatatgaatagacagtacttccaagatggagcggtgaagatgtgtatgactctgagataacatataaatttatcttcggaaatgtcctgtctgtaaagtccgatgaaagagctgtaagatgattatacatttctgctaaatcagcaaaagcaatggcagaacatggaacgtcattttccttaacaataacatcccatgtttctttatctagtgatatgcggccagtaaggactgcctctattataaccttttcaattctggcaactgcaattgggatttcacgtagtaattgttcgttggcaagcttagtgccagcttttttaacgtatcttattgtaccatatttttctgtttcctctgaaaaatctaaagcattattaagcttcttctcaatgaaaggtgaacacttagttggtaatcctcgtgaaattatattacttagaaccgctaaaacgggatctatgtcttcatatatatttgctccaatatcaaagggtgctagaacttcaaaagctgaatactcattccaatatttctgtgcatccgaattattcctgtcaatatcctcaatggtatcaagtctgaaagcacaatggaattgttttggtggataaaacgaaagggaaacaagaaatggtttgccttcttcacgaataacttggaatccttttgcaatacatccataccatttaccattagaaagttgcttatactgacctgatttaaaatcaatgaagtaagcatcatttgggatattgaaatatcgtgggaaggcagaaagtctttcatttccaaagtttaccggaccaacacatacaaaatagtgacgatagcctgatgaactcacaagatatgcaagctcttttaagtcaatctgcggaatatcaagaatattggaaaagagatgtatacaaataggctcttcaatatgtatgcctccaattgcattggctttaagtgattcgacagttgatggcagatagtagtttagggtttcaatgtaaacagaatctcctacagcctgccgtaggtgtaattcggcacgggaaagtgcagcatatgatggttcaatcaaagttaccttttggagcttttctaagagattgtactgtcttaaattgtcaataaagtaaatacttgccaaaccttgtccacatccccaatctattatttcaatatttttgtccatattgagatatggaaactttgtgaaagcacaagcaagtttaccttggtgcatttcaccataagaagcaagataacagcataactgctcttcatcctgaagaatagcagttccatgagcaagtccgggataattccatggagtttgtcgatattgagcaggtacgtgttgtttggctgtctttattatatcatctaaagacagtggagttattgactttatggtatcaatgtaattcattctattccttttcctaagatgttttcattaaatgggtctaacttatgtttgttccagttccttacagcggtagccttactggaattagcataacaatattcgcataaatgtggacaagtattgtattgtccaatatctttactgacaatgcaaccgcaaaattgccgctgtcctttgtctttattatctttcttcttacatagatacattgtatctgtgatttcaagagctccatctggaataatagctccgaattcttttccaaagtgtgaaacaacctcataaccaagaaacttcatgagtgcggaatcattatatgctattttggcaatcagagtatcatcaatgcaacgattgtgctgaataccaaattgttctaatggtattttttcactacatgtagcaagctcatatccccattttttgtttagttcagcaagtcctgatgcaatttcatacattgttgactcgttaaactcctcgtaatgaatattgtttgtctccagattcctttttacttttttatattcagcgatgtcagcaaaactgaatacaagcttttctgtataacctttaagttgatccccaatgtattctattttatgaagtaggtcagtgactctgatagagtcagtcaggataagtgggtcaaaccgccaaataacgtgaccctttcctagaatgtttacaagttctctgaatgtattgattctctcgcttaattcaggcactcctttttcaagtccctctctttcataatcgttcaaagtaaactgaatatagcaaccaatatgtttatccttcagaaattgaagatatggaattaaaggacgtggatttttagaccaaaatacaataaacctggttttctcataactaacatataatggtacaccgttaaaaggattcgtccatgcagaatatcctatctccaaacgcttgaagaaccaatccgcatagaatgctggtatatcagtacttctgcttgctgacacgataataggagcttgtgcttcaacaatttctccgttatctctttttatattaactttatcccaggccatattttttatatatttgctatttgtgaaatgacattcattaaaaaccaactatcgaaaccttgaaaggtaagacgttttgcattggcaccatcacggtgtatttcaataccatcactataaggagtgacacctatcatctttgaataaggaaccttctgagctgaagttggactttggaaaataatatgtttattggttatatagagtgtacctgttcccttattatccatataactgtgctctattggtcttattttggtaccaccaatatgatatgttaaacctttcattacacgaattgaccaaccgcttcttcttcctccatattcttttacagtcttttcttgatacatagtaacaccattatatgtccagataatagtttcacctcttcctaacatgataggagcaggtgtattactagaaggaagaataccattttgaagtttactaagtatgctcatctggccaagtttgctaatctcactgttttgatactgaataggaagattattgactggcaggtggaggtaattgatataatcatctatcttttgttgttcagcattagaaagcgagccatttttcataaaattaatagctgctttattaagaacatatagataggcatcttctatgtttgactgtaccataggaaatttactaagcattttttcacaacgctgatgtgctacaggtagtgttagtttatcagtaaaatattctaccataaaacctcgcattattttcttggtaaattcatcaacagctccattcttattgacctgactataacttaccccaatagcaattaaaaactcatctagtagttttaccgatgatggagaataaggacgatggagacttgcagtatagcgtctgatttctgcatctgctacattgcatatgtcatcatcagaaagatatgcgtctttcttaagacgtagtcttgattgttgaacatttccggccgttgtacgcaatgtaaagtatgagcttacaatggtgcaaaaatcattcacaccctgttcatgtttctccttacattccttatgtgaatgagaaaaccaaccggcatcattaccgcaatatttacaagttcccatagcctatttttttattttttttaattttgctaatgtcctgctattcttaactcttgtttttgtagattgttttggaggatggtttttgttattgaatgcatactcttcattttcgagttctttaagttttgccttaaccctttttattttcttgtcaactttgtcgcagtcattcttagcatactgtaaatctatcctctctttattattcagagtctcttctaatccaaaactgttaattttttcgtcaagtttttgattttcatctaatagaagagtcattttatctgccaatatttcccgttgataggcggtaactaaataaaagttttcattaatatttaagtcatcatatacacaagccacagacatgtcatctttactggctatcttactgattttaggtaatgcgcgttttaaaacgttttgagcttcttttctaccagatttagcaatctgtttataaagatttgcatagaagttatatagttgattaccatcaccataagagtcatctaatccgtcggatccaagaaatacagcgattggaaatgaatcagctccttgataacaatatctgaactcttcaagtgcattagaatcacatattgatgtcgttttgtttaaaaaacatctgttgtcccaaggaacaggttgatcaaattcaatcttgttgttaactatgctcatgcgtacaagtttcccatcacctatatgaaatgcaaaccaaaaagtctgagtttgcacgtatgccatgagtgtacatccgtatgttttctcgaatgtagcttctgggttattgcgcatatcgagaaactcatctttatatttttggtcaacattggaaagttcccattctgtcaaatcattctctcgtgcatgttttgctacagcaacgttccactggcttataattgatgaaaataaccaggtaagcatcttgtgggaaatagagtttatctggctgtctgtggctgactcttttgtatattgcgtaaatggttcgccatgaaatacagattgtctttctttagttactgtctcaacaaaagagcggatagcttcttttgctatattgacgatgaacttggaacctatatcgcttctaaaatagcgttcccctccatggccatctgaaacaatagccatggaaaggccctctgaactatctgcatacgcatagtcctgacaaggtttattgcagagtctatgactctctccttcgcagaatgaatatatactgtccatcaatataacatagaatttattagtcccattcgtcataactatcagtaccagcaggggcaggtgacgctgcagtctcagcaccagctacatctgctgctgcctcattaaccttgtcaattacctgctgctgttttgtcgaatctatagctgatgaactttgacttcctatctgagaagatgtaacagcaataattcgaatcatctttttgagcgcttcaatattatgaacggtgatgactgcttcagaagagcctgtaaattgttttaaaacttctttgtcagcatcgtcacctatggcaatagcaatcttgatagcatgcttaaaccaactattaccctgaagcgttttcaatccaccttcaaagttatctgtcggtccaccatctgaaagaagaatgatagctggggagaaatatccgcttccgcttgatgtcggcataaagcctccagaacgagatagctttttgttcaattcttcacaagcctcaccaagagatgttaggccgttcgcttctactttttgccaaataaaatcctttgcctctttaggttcatcataaagccagcgggtacctgttgagaactcaagtgctgcaacattaatttctgcatcaggattttcatcagaaatttcaccaatcattggcaatacattttcgatggcatcatttacacttccaatctttttaccaatcatactaccagaagtgtcgattacaaaaaatagaatcatctttcttcttggaatgctttcgttgtctaaaagtcccataacttaaaaaatatttatatgttaaacattaaattattatatgatttcacccttgatagcacctgtgaggctaacctttaaccctacttttacaggcatagctttattgggctcaattggttttattttgcctgaaggagtttctacaacccaattatttgtagtgatatttttcaattggactggataacggtctcctggtattgatattacttgaatatcaggcttgttgtccatatcaatatatacttttttttcaggagttaggagtattttacggtcgtttatcttcataattcctgatattgtaaatggcttaccgcaacacatgcattgagcagcgttagggttctctacgaaggtttcttctttacatctaggacatactacaagcatatcacgaagttgctggataatattttgccactgtctttcgagtttccttttgttttgatcatgcaaacaaacagagctaaactcctgtataaaagtatctctaagtaaagcaggaaaagcattccatctgcgcaatacattattgtgtacaccacgaacaggtctgttctctgaattatttttatcgtaaataaagataggctcactgccgtagaatttcttttcatatgtctcagtcatacatgggcaagcaagaacacgtgctccttctaatggatggttggcatagaaaagcaaaaatagcacgacggaaagtgagtatctgtctgtatatttattaggcatagtttttccggtcaccacttccggagccatgtacctggccttgccaagaattccagaggttactccttcaggtgctacattatcattatcacaaatcaagacatcaccagtttcaggatgtatgaaaaaatttccatcatttaaatcctgataactaagtccagataaatgaagcgctttgaaaccctcacaaattttcatggccgcattaaccatagcctcgaaactcttgaattttgctcttgccagcaagtattgtccgaattcataataatcttttggccttaatttcatcacgtaaccataagttcctttttgtttcgttgttaggtactctggccataggaatgcttccgaaggtgcacccttggagatattctcctccagattgctgtaaaaccaatttcccatattgttgaagtaccattttaaagccatcttttgtcctccgacttcaacaaggtaaacgattccttgtccaccacggccgagttctttaacaactttggcctgagaaccgttagtcaaactgacactttcaccgttttttaattcaatcatatctgtttgttttttaaaaatcactacctgataaatttacattttctgctgcttgtaagctgctcgaagaaccacagtttgggcatgtcacaacttcttgatcatgatagcatacaactttcccacacctgttacaaatatagaattttttagagccacaatagggacaaccattgaaatctttatcatacattactttaccagtcacatgagtttgctcatatccttctttttttgcttgttctttctttattttaaaagcccaagtaaaagcataacacccattacgagggtcaacagtaataccaaaatgttcctttgtcttctcacacacagccataatggcaaaggctttattgctcagtttagacatatcttatgcattttttgttttcataaatgttacagtaaattccttacacttacgcatatcctgtcttgacgaagcgattgaaaaggtgttgtatttctcaaacatatccagcccacgtccaagcgagatcgtccagcctgtatctgttttgatgcatctgtcatgaaaatctctgaatttgtattcaaagtctatgccgtatgtagcgaggtcatccttaatgtcatcaagcctgtctataagttcaggaagcttatcgtcctcctcgttagtaataagattgagctttaagtcatcaactggacgcgtattaatgagcatcagcgcaaactccataaaatttttaatttgccatggagcacgtatatatggatcctccacagttatttcatttgcgtttgccatatatgaagcgaacaatttctcatagctaactcccgtttgtcccattctgaacgtcatacttttttcttgtagtatatgaatacgggggcgctttgcagtttgaccggcagtggttccttcctccacggagcattttcctgagatttcttcattcaaaggctgagcatctgcatcggttaactccccagtagctgtacctgtcattgagtttattgggattataagaggattgctaactttttccaatgtctcgacattcatttcaatacccgttcttaaattgatatatttgaaatgtgcaggctcagctttaaatgtttcatcaatgacatatagttggtcttttactcgctttctactttctgcggcaaaatcaaccaattcgtatgcttcctggtctgtcatttttccatctgggtagagaagtttcatcattccggagaaagtcttacggattgctaaatgatcacgttcagatagtgatccgtcaaacttggcatagtctttcaataccgcggtgcgatcatcgttgcgcatggcatgtagtaccgcagctatataatccgtaataagtccatagcccttggagaaactgtctttcttcagcatcttgatttcccagcctgggttatacagatggattctgtcaagaaaagcacctttgataaaggatgtcggtatagattcaaaaaggtgcgtgttcttcaacatgaagggaacagtatgtttggtatttccaacaaaaaccatggaggcacttgcctcatgtgttcctttgcctcggttgaaggatttattagccagataattctgcatggtatcaatgagcacggcatcaactgcacgtcctttctgttgttcaaactcatcccatgcaaccacatcccaatatccaacaagaccaagttcttctcttttcccagacatccttacgaatagtcgtgcactggtcacatctccacctgatacaagtactccgtaaggtgacaattcttggaatacgtgagactttccggttcctttaggaccaagttccataaagttgaagttattttcgacatgaggaagcagacgggcaagtgtgataaacttttcccgtcggttcatcgtatctggatttaagcccactgtatgcatgagcagatcgatccattcttctgtagtaaagtttttacgttgttcaatatactcttgcaaatcgatattcgaaatctgtataggctttaatgtctggatttcccatctcacttttacatcttctccactgatgtagccaatggtgacgatgcaccatacaccgtttccgctcagaagcttcgggttcttacgtacatagtcagttcctattggtacaccggagagtccgagattggtaaaagttgcctgatattcatcattcttttcattaagtacaacagttactttatctatgattcgatgtttaccatgctcacggataagtccttttaccgactcagcttcagctctgtgtacatagttattcttgatgacatcttttactttctctagtccctcgttaatgatttcttcatcatcactggcacaatattggccaagcaggtattccaatacgtaagtcggtacaggaagtccacccttaaccaaaaacgccaggtcttttcttactactttgccaatgaaggcatttaatactttctgctgtgaatccatatagtaggctcctaaaaatcttgttctatcattgtattatttttaactgtctcacggataagtggatttaaccggtcgtctgtagcataaatacgaagctgtagcatactcgcactgattgatttattcagattaagcgtcacctcatacactcggttattcaggtttgtagcatctgtactgtttaaagtaagttccttttcctgcgtaacaggttcgtcaccgttgtaaatgcagcatacgatttttcgttccatcatcgtcatgcttactgcttctgattgaattagctggaacttgagtcggctgcttaccatattcaggttgtggttcataagagtaacgcctaccttttccgtcttatttgttctcttctgctgactgcgaatcacaggaataatcatctcctgaagggatgcaccaccgtgtgcaaaattataccccccagaggctgccaatctgttggtaccgacagatacacctacccaaagaggtgtctggctttttatggcagaaaccttttcgagtgggaatttgacgataccctcgactttagctgtgctgtcagtgagatagtatcttgttttcttctctactgaaatatcggtgatactatgcttatccttatcttcaaatttcatgtcattatataggaatccatggtccgctgtaagcaagacattagtcacattccatgaagcatgtaaacgtttgattaacactgcaagttggtctatggccttacgacaggcactgataacttcaaacgggctttgagaatgactcgcttcatcaattgtttcatgaaagatatataccaaaggccgtttaaacagctctcgtgttgaagtctggtcaccgttcatcacatcttcatagcgaacacaaattcctccgtctcggtatttattcagatgagcagttcgttgttctgttgtagttaatacaactccatctacggccatatctgtgccgaacagttcaagggagtgatgtggaagaagtgatggcttgcagaacttggtttccgtaggtaacatggcttgataagcttcaatagtagccatatgcttttccttggccagtctctgcatcaattccatagccacttcgtatctcagagcgtcactgataatgactacctgtttcacatttggatcagactcgttagcatagaagtcttcctgatgcttcaaccccgtttctgtaaaccaggtgcctttttcttccacacaagtcaaccattcgaggttaagcaggttggctatcttggcatactccaaatccaattgtcttttggcagcattcaataccaattcgataggattctctttcgtgagtagctcatgataggcttcgagtgttctacgatagaacatatctacctgatagaactccgtaatatatttatttacgtattcttttgtactgtttaatttcagtgtgccaaggccacgtatctgcatatagaacagagctgactgtccgatgaagcgaatgacaatctggatgtaactgtcaacaggtaatttcagagccaattctcgcatacgatcgtttacgtcctctggatcagccatgagtttcttttctaaaatctccttcagaatcggccagcaaagtgcttcagtaaaatagaagtagtttgcatcaataccatagatgttgatgatttcctcttctttaatatctgaagacaatattctcattgactggataaatttctcgctcagcatacggtcgtgggtgccccactcataaatcttgtttacctggtcaaggattaccgaattgctgattttatattgcttgtacgaatcccctggcatagcatcaagtaattgcgtgatgcaattgtacttcatgcattctgcaacgcacttcatcttttgtggcaaattcagattataacttactccaaaaagttttgtcaatttatcattgattgctttgctggcatctacgttctttgaaagtttatgccaaaaatcagcatgttttttcccttccgaagtaacgtcaagaacaaccatctttacaatgattgtttcccaatccaacaactttttctcgccgagataattggagatgaaagcacggcaaaccaaatcctcactaaaggtacttgaatcaatatgcccattaagaatattatggattttagaagacatgatttccgcaatatttttcttgataaaactacggaaccgttctggcagattatactgctgcataaaagaggcataatcatcttccttatattccatgttggctttcagcatatcaagcaatggaaattgtagttgctgttcctctgaatgaggataggtttccacaggaaaaagcagaacaatgcgtttgtctttccaagtattttcaatagcatattttgtattgaaccaggctccatcgaatactttatatatatatccgtcagcccattccttcacctctccaagctctgtctggataatatccatccggtcgaagataaagagcacatgaagctgtgggtttcgttcaaagtagttatatattctttcttgtaccatattctaatatacttaaattccaaataatatttgtccgaactcttcttgctttacctctattctctctgaagggaagattgtagaagttgccagtgaggtttttcttgatagcaaatcgtccaatatctcatcgaatgttttaatgtcagatgtaactgccataggataatatacatacacatcctttgtttgtccgatacgataagcacggtctgtagcctggctttccttagctggattccactgcctactgtagtggataacatgatttgcggcagtcacattcagtcccattcctgcagcaacgggtgacattataattacgttaaatccatcaacagcttgaaactcatttatgctcgcttgtcgagtttgcctgtcaaatgagtgtcttttaataatagacggagtatccccattaatgattttacatattatgccatatctttcattggaaagcttttgaagcattttctgagtctccttacgttcaacaaatatgatgactttttcttccttttctttgattgaatcgagaaatttgatagtagcctgtaatcttgcacttgtactaaccagctcgtttatgtcatgagtcgttaatgccgagtcgtagaggtaaggatgttctgaaacctcccgcaagttcattattgtaacaagcatattgggttgaataccattcatataggcattaatgactgatgtatatgtctttttttgtacacttggcatggcaattttctctttgagttcatgttttaaaggaagatcttttgcagcatctttctttaatctgcgcataaaatatattccaagcttttcatgaatttcattaccaagagcgacaatgtcagtgtcatctttttttaacggtgattgatattgagcagcaaatgctttcgcattacctaataaaccaggaacacagaaatccatgatacaccataaatcaagaagtgtattctcaacaggtgtaccagtcatagcaattctgaaattgcatttcaatgccttggctgcgttggtaacaagcgtaccgggagacttaatcttttgtgcttcatctaatgccacgatgtcaaactccaccgcgcagaaatttaactgtgatatacgaagagattcatagttagttaagactatgtccatcttttgtattctatttacaatatctttgtcaaactttcttggcacatccttagaggtaagcatattaatagtcattcttggttgcttgaagaatctttcatattcatttttccaattttctaacagtgaaacaggagctactataagatacggtttgtgatcagcatatttccttgaatgccaatcaataaaataaagtatctgtaaagtttttccaagtcccatgtcgtctgccattagacacccacttgctttacttttatataaatgctgtagccatgcaacaccttctttttgatgttcttttagtgaatagcattcttgaagatatggattggtgaaaagggtatatttttcgcctctttcgataactctttcttttacagcaaaaccaagttcttctgcattttcttctataataagcacttttttgttatcaacagattctgcattaaatggcttagatggtgcctttaactgctgtgccgcacaatctgcaagaaacaaagcatcttccatgtctatttgggcatttttatactcaataatagatttgccattctcttttgctttattaatttcttttctgagattttccaattctgtctcacttgaaattgtcacttggcttgttccattttgaggactttcaattgtagcaccagcaatccagcatgatttgtagggacaaataaatggatagaatttgggcttataaacaccaatctcaattacgcggtcactatatagttccgataaatcaaaagcatcagggtcaaaaaactcagtaggttcttctataattttttgaatttcttcgcgcgttttgtgtcttccgccttgacttttaagatgtcgtagattttccttttgctcttcattgagtacaacgcgaacacgttcgccattttctctttgaatagggtactgtccctgtacttttctcattcgatcaaaatactgctgaaattttttattttcatcaatgtcaatggcaggatcaatggtaaacccatcttcatcacgaccaacttcaatttttatgcgttctggaacgtaaacattctcgtttgctaaataactgtctaattcgcatccggcttgttctgctaatgcttttatctctccaaaattacgcaggttaaagtctgtagttttttcttcctctggagaagaattaaactcatgaatacgatttatcaattcatattgcgcttccgataataaatatttctttttgttgactataagtatatttccgcattgttcatatgataataattctccatctggcacgtggctaagaaattcaaccttgtattcaaaatcagatgcatttaacatgcttgttccaatgagacgcatggccatattatagggttgggggacacctagaagtaacttatcctcctcatctaacagatagatattttcataaggaacaagacaaccatcttttgaagcataggcatacccattgtcaaccaaagttgaaagaggcatataatatatactatcgtctgtcgctttccattcttggaaatgaagatcatgtccattgaaatttacaatgaatagtattcctattttatttactacctgagttaacatatgcttctttaaattttaatagtcatataatctgtttgttctgatctctgcttatataaaacagttccatttgtttccttcaaatatccaacacttatttctcgtcctgagtttgagtgtacaacctcttgccatccattgtcatttcttgcctttcttatccatacactaccagttggggttgctccgctaattagtggacgtagatgaacaaattgatttccagcggagaagttaaggtagaaacctttatatccacaaacaatccggcatttaccatttgatatccatttacttgataaagagaaacgaatattggcttcatacacggtcttgattggcctattagacgaagtcctcgggactgaattggatgatggtttaaactcttctttttgaattggggttgccttaaaaagattattgtcttcagcatcctgaaaagatatgccaatgttatttgatgaaatgactttttgttgcaaccaaccgcttaaacgtccttgccaatttcccctatgggtcattcttccttcctcgtaatatgtattgtagtaccaatcacttatatcaatcagacttcccatagatgtaatcttcagatctgcagtgcttggaatataccgttttttccctgtcaccatcttaactttttcatggtcctggttgtaaacgtacaaagcaccggtatcagagaactcaacaatcatcttattcttaatgaacaatacaagagctgatgtctgtgatgcgaacgaatctgtctcaatgaaatgtggcaggaaaataccgctgactcggttatctccttgtaagattcttttcgttgtagtagatccaacaattttgaaactgcttacatattccacatattttagccagaagtcctttctatccctgtcttgtacacaaacttcaaaaaatgtctcaattatcttttgactaaaccatagatttacatgttgttttgcctttttgagctgttgggcttgtttttcagttgcgcctgcaaatggagcccatgttgcgccaagcgtaatatcgcctaagattcgattggcatacttgcatagttgagtacgttttacatcatcacctgtttcatttacgcgtaaaactaaatctgcaaaaataagttttttggttctatcatatttgtgagcatttaaaacagattcaatatagtcaaagtctatgattttattgctactgataaaattaacaatcacatcagagtaatatgattggcttattgttgacagtttgttactaaaatatgcaggggcattctttacatcctgtttcttttgagataatagagcgcatagtcttaggggaccagcttcatcaaatagatttgcatggttcttcattaccatgtatttcttgtttgaaccattgtattgttttagctgcttgctgagcagatcacaagtcaatgagcgaagctccgggtcaatcatgttccatgagtcaagacaataaaatgataatccgttaaagaacatgtccctccagttagtctctagaatatgaagcgcatacatgtatgcctgttcattcccttgaagttttattaaataataagaaacaatacgaagttcatgaatgctccaaatacttgtttctttattttctgttttagcattctctatgactttctgcataatttcatcaatagtctgttgagaagcaataacagttctgtcggtcatcatgcgtacctctatttcctgcaaggtacgcatattgcgactgatggccaactcagtctgatggtcaacagtacgttctgcaagcaagtggaaatcttgcagaagatctttgttaatatttagaagtgcatagatgtcttccattattgtttatgtataaaacgtttatttgctatatcctccaattgcttttcagcattggttcttactctgaactctacacgtcgtgataaatccttatcttcctcgccgttcattttcagtatcaggtggcttgaagaaagtccgtttgctgttacaaggcctttaagccactcttccaagtcgtcagacataagactaaagcaatattgtaacacggctcttgttctatcctgagaaagttccatgtttgaataatagcctccgttgctgttggtgtggccttcaatacgaatttcttcaatattatctcggtattcatcacgactaagtacggctatatatcttgggaaaaagtcatcaagaatattcttaaacttaggtttcagcaaggactgtccttcatcaaaaagcattgacggttcttggaaacgaatgcataaagtcgagtctattgtagccctccaaactgcaagatcatctttgaactcctgctgcagatcgatgtaaagttgtgttttgatttggtcgtatcttttcacaatttcctcgtcttgttctgccttttcttgcacttgaaggagcgctcccatcagcagcagtataaagatgaacagaagactggccattaagtcacctgtggagagtgcaaaggcattctcatctttactttcgtattctgtacgtttcttcttcattatcgtttattacgtgtaattgtatcggtcaacatttctgtaacttcattctgtcgttcaatagctgaagcaagcgcacctgtagtttgggttaggctcgtagtgtactgagcaaggtatttgtcagtactttcttttattgttcggctgtattcagataacccgttctgtaactgagtaaagatagttccaagtccttgtttgataatctcaaacttttggacataatcctctgataactgacctgagtctcttaacatttcagttacctgatcaatacccctttggctcatggtttgaagttctgcaagccttgtagcatagtcgttctgtcctttgttgaacagttctgtcgctaatttcatgtcaccagatattgtacgtagattacttgtgcttatcgttatttctccctgagcctgtctgaagccattcatagttcctgaaatgtactcgttcatcttctccaaacgttccaatccaatattgaaactgtcaagcagtctttttgtctgggatgtagtatcttcctgaagtgcgattaggttggcttgtttactatttacatcatcagtgattgacttgacggattctgttacagaagatgataatgtactgatagttccagtaaggaatgtgcccatcttgtccgcagcatctgccagtttgcttaccatctggttactttgctcttgggatgattgtgaaataccagacataacttctttaacttcattaatggcattactgatagcaccagtagcaaatgtaatttgttcttgcatttgtctcattgccatagaattagtattggcagaggtattggatatttccgaaatggaatgcttaacttcttcaattgtaacttgtaatgttgctgaaatattttccatgtttttcggaaaatcggccatagcttgggttgcagagcctaactgatgagccaaattttctaattctgttgtagccgatccggaaagtcctgaactaaactcattcataagtaatttcatgctttgcttcagttcatccacaactctctgcatcatgtcgcttgccggagaagatacagttttcgccatttgatcaatatgttcaacaacggttttagtggttgcatcgacactttccattaacggaagaattttttgttgcatctgtcgtgagagagtctcatcaaatccttgattaagttctatagccaggtcagtagagaatgattttagagcttttgtttgctgggcgttctcagaaagaatttctcgtacagcgttggccacaggtatgataactccagattcgtttgtgtatgatagttttccactaagctcattaaaggagtcttttatggtattggtttgtacctgaaaatcggactttagtgcattgtaaagtcggtcaattatattctgctgattaagattggccaatgctatgtcatcaatataataaagggcatctagcttttctgtcagtccatttacgtttttatacaatctatgtcttaatgatttatctataaatgtaaatacaatagacagaaacataccaagaagagatgtcaggaacgctgtgcccataccattcaataatccctgaatactttcattgattttatctgtgttactactgtcaaatccttgaatacccaaagttaagccaaggaaagtgccaagaagtcctaaaccgacaagcgtacctgatgctgtatcaagcatacgtaaatttaccttgttgcatttacacacgctgttgtcatatataaattcagatgcaggtatatttgactttttcccgtcttttgtatttacgataatagttttttcatatttttccccaagcgaagctatcttggaattgtttaatgaatccaagatattctcactattaacaagttttactaaaatttccttgatgctataaagttttctttcttcaaaacaaaagagtaagaaaaccaatataattactgcaccagatgctaatgttataatatcagacatgttattttttatttgcagattctattgttattattttattaatgtttattctatcagatttttattatataaagtaaatatccgttcttggcaattcgagaactattatgatattcgtttaatcaaacactatgacatcgtcaagcattattttccgagtatcatcaccaactacataggttagctcggtgttgtcatcatactttttgggaagcataatcatacaattccagtatgacgtgttcgagatgagaaagcccggatctatgcaaaacaatttagttggagtatcttcgaactcatcggattcttccacaccaatgcagacaatggcgtgtccgaaattctgattattaaaagaaatccctaaaattgcaggactattctgatgaatattgtcgtaaatgcggtcaatataatctttccgaatagctgtggcttttatattgaagtcggatgtattactaatttcctgtgccatagttttaagattccacccggacatattcataccgcgttgttctagaagtttgctaagaaattttcctttcggactacgcttgtccacatttccggagtatgaatttacatcctcaatgttgatttgctgaaggcacatcaaagagatgattgtactataaacagcgcatgcaccgtcaagacttccttggtgcagggctatactttttatgctgccatcagcttgtgtcgtttttactcctgttctataaagtctcacagaaggaatgattgttattgttgccatatatattctcctttcgtattgttattttatcagaataggcctacattatctctcaaccaacgtaattccttttcaatgcttggattatttaaacctaaactttgcgcttttttaaggctttgaaaagcctctctataccgtcttacagacgagagtgccatacccatatttgaataaatctgagcgtctgtaaatggcgtattgggaatgtatggttcattcaaagctttttggaatgcatctattgattctgtatataacttttgcctgtagtagtgaactgcttggttaaaatacacagttctgttacctgaaagttgtttataccatttcaatcgcattcctacttccatatgttcaatatcgataattccggttctatcatttggttttgtaaaaccacatttttcagcaactctctgagaaggctcattatccatactaatatccaagattacttgttggaatgaaaagttttgtaggaggaaattcgttagtccattcaatgctgatgaagcataaccgtggtgtcgatgagagggatgaactgcataccctacattccacacaggcatattagttgttcggttcatgacaggttctgctgagataaaaccaacctcttcaccattattattgaaaatgataaagtttaatgactctctttggatatttgcattaacaatatatctgcaaaaggcctttatgttttcagcatgatctttacgtaaaacatagtatttctttacgtcttcgtagcggaatagttcttctataaaccaaacattatttgagttcacgggtaacagagaacaaattccacattctattatatttggtattgccatattaaatatcttataattaggtgtttattaaggttatttgattttctgtaaaacgtctccgaacttagcataattcactgtgacaccatcgtcaagattgaagctgatggcctgctctgctacaacctgcaaacgttcgtgatattcacgacattcatccaattgcttctgaagcgtttggagctgtttgctttctttagtcgtaagttctgcccgacgcaagtcaagtttgttgatttcctgttccagatgttcaatgaaggggaggagatattttgctcggatgcgctcaactgtataggcattcatacggtgcatgtaagctattacttggaaggaacctttctttgatgcaaatagccaatagattggacggttctgatacatctttttatggtctttccaaaagtcctttacgaaatattgctctatggtcttacctaaacattgctccacgtagttaagattctccacatgaagttcttcacccagtaccacacgtaggaaatcagcgaaacgatatgatgcgttgtcactgaatccgcaatcatttgccatcagcggcataatgccgtcgtcatcaatttcccaagactgtccgttaaatgtgtaagaagcagtttcctcatcagtaggattggggtgagcgatatgcaatcctggcttatcaagacgatagcgtcccaacatacaacctacagcaaagctaataagttgcttcatcaatacttcgtcgttccaactgagactgtcatctgcaatattgatttctccttgttgcagaatggttatctcagagagtgtaacatctggtgtaagctcatcttgcagaccgtatatgtcaatgaactgacggttgagctcttcttcgttctcgtgaagctgcatgaagaggtgttcccactttgtcttgtattgctccatacgccatttcagactgccaagttgcggtgcggcaggattgatacagatgtgtttgtctgtttctttttcgtgcagcttttcctcgtggcggatattgtcgatataggtgttctcgtttacagctaataggggattagtttcgaagtcccatgaggtttcatgattgtcccaatcttgtttggaaatgttgatgttttgttgaacacaatgatttatataatcattattttttcctatatatggtactttgaaagaatctccaatttgaaaagatagagttggacataatataaatagcaattgctgcataacctttgagtttaggaagcccaaaatatactccttcttttcttgtgggaagcaagaagggccattacagtcaaagataaatccaggttgtaatatccttgcataaaatagatttgaaccaattcttggaaaagttattccatctgtgaaataatatccgggatttcttataacagcaggtttaaatgattttaatatttctccatcgttataccaatcaatgatgttttcactgaggctcaaaccgtaccaacgtctaacatctccacctttattatatgggaaccattttaatctggatcgagccgctgacgcggcattttcgaagccgaagcctatacggcttcggctgacctcgaaccagctgcggagaaatctcgcattgtcagcagttgccagcccctgtgttgggctgcaaactgctgacaatgcgagatttgatgtaaatatttttaagatattgggtgaaacccaataaccaatcggacatcccgggattttctcaaagttagattgagggacatttgggtaatacaccttggctgtatgttcctgcaatgcctggaggaacatatctttcttctctgcgcaattcttaccatctaccagtcggaaatacacaccaccttcatcagacttatttttagctacaacaaaggaagtgttttgcaccacctcaccactcagctcatcgaaagttcgagggcccaagtgaagcatgttttcaatatgatagttcttgagtaaagacgtgcgtagtttttcgaatgaagaaaggaacatccagctctgcatgttaatcatgctatatttgccgttgtctgcaagtctgtcaatagccaacaacataaaggtggagaataaatctcctttgccttcttcataatttgccttcacatacttactcagcacctcattcatgttgccaccacccatatacggcggattcattaccaaagcgtcatacttctccgtcaaagccaaaattagctcaaaagctggaagttgcaagcgcacggcatcgggcataatctcttgattgcaccagtaatcagtagtctgtttaaccagtaatcttgtgctgtcgctaatgtcgaatttcatgatagaacccagcgagtctgcattatgcatcagttcaaagcaagcggcaagttcttcattttgtgaagaagtgttctctccctggaaataaagagaaaggaaatcatttaagttttcatccgtttcttcattccatggtttcggcatggtcagtatattcggcaagcaatgcgcatcagcaaaagatgaatccttttggcatgctttcaacaaaagggcaaaagttgctaattgttttgcacgattatccaagtcaatacctgtaaggttatgacggaaaatgttttcaatggcttcaccacggccatagccttcagcaatataaaggtcataaaacaagtcgaagcactcgtttagaatgtgtccagaaccgcaggccaaatcggcaaccttcaggtcggtaagctcgttgtatttcagtaaattttctggagtcggtttttctgtctggttcactaagtatcgccacttcttttgaagtgttgtttcatagggattattatccagatagatgcgacccactgtgttctgcaccatatatttcactatccaattgggtgtgaatatctgtgtagctgccggtatttcgtcagcctcgaattttcctttctttgcaaaaacttcgtctttacgctctgatatatagaactgatagagccaaccaattagttccggagactgaaactcttcatcggtaataaattcagtatggttcagcatatccatgaatttacctttagccagaatatcgttcggaagaagtagctcggtatagtcggccatagaaccgaaacactgattgaggatgggattatcgtgacaccaagcagtaataagcaaggcaaactgttctgttacctttgtatcgtcatccagtagttctacaatgcgctggcgaatgtcttctttcatctgaggaagatgtccttggcgcgcttcgtccacaataatcggggtacgtgcagcatcagcatactgaagtacaggagaacagagattattcttctgcagaatacgaatggcacacagacggttgaaccacgtataggctgcctcctcatacacttcgttgatgcctttttgctgaatacgattatagagggacatccactgatggtagaatccctctgtataaaattgtccgttccaaagagtacctccttgcatcagttgtggacggtgctcttcagctacattacctttcttgttgaagccaagtgtagttatcttagctgcaatgccggcttttaatatattgcgagcttcggtagcgaagcgttttattctattggtgtccatataatctattggtaatctttatttaataatcatcactccgtcatggtcgacaagcagacgttcaatctgttgacgcaaaccttcaagataacggtctatgtcttcttcgttcgtaataggcaactttgtccttgtttgcaatgatgcctggcgaattctcttttctcgtacaggaggtgttggaggatcaacttcatcattgtcctttttagtaggcttaggaggaatatacgacataatcttgttcacctgctcctgatagaatacatcggtaaggatattgtttctcagtaccaggatatttgttggagcagttttaagctgtatggttgcttcacggtcggaaagtacacttgccgggacattctgcttctcggccacttgtaacagatagtcaaaaatatcgttataagccgctttaattttatcgcgaagttgatttcgcacatcgtccaaactgccggaaagctgattcctcaattttatatagccacggaatgtgttacccattggccaagggtcatccttcacttttaggaactcatcaacagctcctatcatctcttccggaacaaatgagaagttatatgtattctcatcagcgaactgtatgagctgtttataggtagagagttgatcatgggtaaattgtaccacctctttgcatttgtcggtaagcatcctggcttcatcctttgatgagatgatgagattgaagaatttcaacggatcacgttcatcaagccatgattcgaagagatctatggccttacggattggttccacaaaaggataagctataatctgttgttctatgtccttatagccttttatcaatttggacaggctacgctcactctctatgtcacgacacatgcggaatagttgggtgctgtctgtagttgtcggagcggaagaaataccgaatatttccttccaggcagctatgaatttctgaattacctgcggtgaagtgacctgtgcctgacggagtgtaaacttattactctctgtcacaatacggttggccactgtagacgtttctacattgggattattggcgtaagcgtagtcacggttgtgacgacgtaccagttcattaatcacataaagggtacagatattgtcccatccatatggagcttttgagaatttggtaagcacatcagtcacatttacctctgcaaactgtttattaagatagatttccacttcgtgttcagcatctgtaagaatcgcccccataccttcgtaatcgccgggattcacattacgcagtatagctttcttcaattgttctgtagtgcgtggaatacttggagaatcaacgagatttgctttagggtagattcctgccaaatgcttctcgatggcaacacgataacggtcattacctcgtttctgtccaagctctgcttcgtcaatcacatatagtccggaaacaataggacaggtatcaagaatcttttcaaactcttttttaataagtccttcgtaaagttcctcggctcgcttggcaaattctttacgagtattggcattatcctcgtttgggacgggagtggacatataacgttctgcctgacagtaccagtaaaaggcgttgtacaaacgtctgttctcacgatattgaggacctacataatataccattcggttagtattgctgttctgcaatgcaagctgctcagcagtatcatagtcggggtccatcataaactctaccattacatcagggttattactcaggaaggtacgctgctttatggtcagcccaacggagaaactgcgtgttttatattgctctttattcctgagagctgtaatatatttattaaaaatatctttcagctgttctgcctgggtattgttgtccaccacctggctttggatgagctgcgccactttcatttcctcctcactatagaaagtgaatgtgtcaggagctccctgtttaccctgttcacggcgaataatattattatcgcaaaggaactctaaaattttctccacctcattcttgatggtcatacgaggagtatccatattatttacaagaagagaggtcacattatccacagttgcagggaacagcaactggtcggtttgggaaatgttgcagatcatgaaaagcacattaactacacgaaccgccagacgagtcttttccggtttatctgtctggtaggagcgtgccatacggagggcattgtccacagctttctgtccacgagcctgcaaaccttcctcaaacatattgttatagagttcatcgaatgaaatgaatttacccaattcagcatcggcattagccttggcggtagagtggattaccttgatgatgcttcgctcattaccttttacttcttttgccacatagcctaagttcaggaacgaattgaacacctgcatgatgagtttgaactggtaggggacaaaagggtaatagtctatgaaatcatcctgcgagtcgtaactgctgtatgagtttggaagtttgaactgcaagtcgaatccggccttgtatttgttataaagtgaggccaacgtatcttttacttcttctttcttgtcgagaatacgtttctgagtaatcacttccggttgtgttcctttgagggataccttcacttcaaagcgtcccttaattttaccttctttatctttctcctcggctatatgacagtcgtccataatctcggagaggtcttgctgtgctgtacaagccacccagaccttgttatcacaagcttcagacagtttcgtaatgatttcctgaaggttaagataacggtcacgctccttgttgatgaactgtgaaacttcatcggcaaggaaaatcaggcggtaatcatcgcccttgtctttaagatatgatgccagttccaaaccaaaacggtctatactcatgttcgtatcacgcttgatgatacgttcacgaatactatctacggaaagtgttggtgccagttctttggcaatgtcaagaacccaatcgagttcgttgtcaatcaaatcggcagccataccagggtcattccaatcaccaccttcctctgcgatgcgttgtttgaatgcctcaaacactcctttttcttccaatggtttttcaagattctgtgcaagtgtgatattgaacttattgaagccacgcttgccattaaactcattccagaagacatgcagaaaagctttcttcttgtcggtagagttgtcatagcttgtttccagattgaagatacatgtatctatcgtggcccgttccaaccaattggcgatagaaaccatctgctcgtagtcgaagctcagataatgtttgtcatcaagcgggtcgatagcctttattgcttcgagcagacgtgataaagcatcttcacgagtagaaggtgtgatacagtaatccagatatttcagaaaatgtgattttcctgagccataataaccgtcaatccatatacccacgtgatcgtatggttggttattcttgatagcatctaaaatacggaaaagaccgttcataatctcgtccgtaaacacgtattcctgtatttctatacgttctgtttccgggtcaaacttggtagcgctgacagcaggattcactgcacggtcaataggcttattatataattctttcagtttcattagcttattcgtttattaaaagagtggcacgatatgtatgattgtccggaagtgtatcaaatagccggaatgagttctgatcacgatgacccggataaaagacaatgattttatatttgtccgtttcgttgtaatcttcataaagagccaagaattcattgaccctcagataaggatacatactgcctataccatacataaaaacgtagggacgacgatattggtctttgattgtgatatgatcgatgatacgttgatgtataaattgaacgaattctggtgaatgggcattgcgggcaagcgtatcctgtgtgctctttgcctttgacgggtcactctgttctttttccatcagatatttcaacatagaaggatgacgcagaaatttcttctggtcgaggaagctgcaaaactcatcaaacagattcagtgtaagcacatccacatagtttgtgggacggatcagattcgctttaaactcctgtatctgcttacgaatgtcatactctttctctgccggatactggtagatgaaaaagttataaaacaagtcgccattttccgtatcttggaatcccggactattcaatttatcatcaagctcttttatggtcatatcattgttttctttatgttctctatttcataaggttgcaaaagacaggcttccaaaaaccatggttgcccttttcccaaatagtaagagaaattgctacaggaaatcgcattaagatggttgctattgtcaagcatacccactttacgaagtattgtaagatatgcagaagccactttatctttggtattatcgctccatgagtcaacaaactcatcttttgatgctatttcgttgaactccatcataatgtcatttttatcgatgcttttggatatgctgttccatttttttattgcaacatttacatgaaaatcgaaacagatcttataagtcctcaaaataacatagaagatagctactatcttgtctgtatcgctcatttcaagaaagtcatcccaaaaagaagatggcatagactcatatcttcgtttgatttccagaatagctttcttacgagaactttctgcattaatgtgaagcaaccgattattcaccttctcatcatgaagcaactcctcactattggttgcacggagtagaggtaataggatattggtctcctcaaaaaggaaacctccacccgtgatggctgctgtatatggactattttttttattcattgctttgtttcttacaaaattgttcttgactggtgcagtctatctgcattatatcataattctgcaaattcctacgtatatttgttattatttcttgtttgtatgtctcaggttcaagcaccttgacatcatagccgaacgacagaatcagttgagtaaattcgtaagtaggccgtagctctacggacaagatacattcttcatcatcaatgattttctgtgtatgatgtatcggcttagaaacgatatagggatactgtcttttagaaaattgaagaacaacacttatcttttccacgtcatcgggcggaatagtaactccaaatacgtcatcaaaataatgctcaaaatctatctgatcatttgagataaagtcaacatcctcctcgatacctatttcctggatacggtcaagagcaaaattggagatacgatttgcttccgcatcgtaagccataagaaaccagcggttattatactgctttatgtaccaaggatgaacaatgacattgcgctcgttatcataattcttgtaattacgatatatgattcttatggcctgatgattaatggccgcatctataatgtcagataagaagttcagacctttcaaataaggattttgttcgaaaccaagaatgttttcgtttttttccctaaggccgaatcgccattcaagattggaaataacttcttcaacccattcgttgctgggcagtcctttaaaacggttaagcgtgatgataacggaacgtagttgagtggcttcctcttcagtcaatggttgagcattaatagtgaagtttgggtcactgtaacgatagtaaacccttctgccatcctgctttctttcaagaggcacactccatcctgtttcactctccataaacttaatgtcttcaaatatctggcgacggcttacacctccaatcccattataatagtaaatggcttcatcacatttatcaatgagatcctcgatgtaatacttatgccgtcgatcccgaaagcatttatcgagagtctggtaacgtatcgcagcatttttatttgttggcatattgggcttaatctaatattaacgaattaaatcatttactgtaacttcaaggcatttggctatttcaactaaattctctaagttgggttgggcactgttggtgcaccatttagatattgttgccggatctttacctaattgttcggcaagccatttgtttgtcttctttttttcagcaagaaccacttttaggcgatttaaatctttacccatatttcattttttttggttacacttatagatacaaaagtaatgtaattatccgaaataatattctaataatagaataaatgagtgatataactcaaaaaaatgattataacgacaattcctgagttgattttcttatctttgctattgatttaatggttgcaaattatggagatttccgtttaaaatgcagataggctgcatagattggttcaatctttgcatatgaatagctttaaaagtacaataatatgaacgttggacaatttaacaacattctatcttgcggttgcgcatcttggaatgctcataggcttataaatgaatatgtgaaaattgcttggatggtaaacgatactgtcccattcaaaaacttgccatgggataatcaagtaaggattcttcgggtaacttctgttattcgtgcttatttgggtctggaatcctgcatgtttgaaccatttgatataataggaagcgtttttcttaattctgaaaataaagatgtcttgtctcattctgaatttagtaatgctgatcttactcttttgaaacaaaagctatgtcagacaactgaagaaaaatggaagatggagcatttgttgaaacatttccagactgattcagatagggagcaacttttgacgatactacttcgctacagaatagcaatagaagactttgagaatatgctttctgttaagttggataaacgaacaggaacatatattggaattaatgtcgtccaaaacttatatcatcctgaaatcaacaactgtaacaatataatggacgatatgattgttctattgttaggtaacacattcaaaagagccttcactgagagggaattgattgaacggtttgattatccgataataacggatagagaattgtttgaatggagaataaataattaaatataatgccatgaataataaccagaagcttatagatgctgtaaattgcaagtttcctcaaaataatctgacagaaatttattataacattggtagaattctaccattcacagcacaaagatttccagatggtagagtatcagactggtatagaaatcaatatgttcaagttgttaaagttgagccacatgggagattcggaaaatacggaaaagtctatggttactattttcgtaatggagaaagggctgatagttctgattcaccggaaaattcatggtgtaaaaaagacgatacagagccaaaagagattccatgttgcggttgcggttcctggttccttttagatatacaaggtgaacctatagaggggaatgaggttaaagtgcttggactggatgatatattcacttttggtaaatataaggataagaccattaaagaagttatcgacactgactggaattatgtgaaatgggcaattattgattctcaacgtttaattgccgatatagatgctattgtagagtatcataaagggaaaataaagattctacagccagatgatgtaatctcctttggtaagtacaaagggaaaacactgcaaagtgtattcttggcagattcccagtatttaaagtggatggaaagccagaatcctgatttcaaggtagactgggataagttgtctgatttttcacaagagtaagatttcaaagcattatgaaaataaaccaagaggatattgaaatagctcagattctttatgaaaagatgaagactttgccaatagaaacctagataagcgtttcatagcttggtagaatgaccttagaagaaggcttattgcaaagtcctttgcctgtctttgaagcttgatggcctgtcatggaggcttttcgttgcataatgaaggcagaccaggaagcttcgtatggattttactaagcacgagtttatgtgttagggacttcctttcaatattaattttgttctacttagatggtgtagctcggttttccaccactgaagagagtgtagaaatatgtaaattgacaaaataatattagctaatgataggagcaataattggggacatagccgcgtggacgtatgaacatgatagagaagcgttctggaatcagctcatatcttacgatgacaaagtaagtttgtctgagtttggccgtgcttatatgcaggcggcaagttggaatctgtctgctttatcaaatcgtgagacttatactcttgatattacagattattctccaaccgatttactttctgtaaccgggcagtggcttatgtggcaactcatgtctgcatggaatgataatttggactatcctaaagggctaaactatgctccatatacagataaagaggaattttacgcccgcttgtttgtcgtggacattattagagggctgagacaagggaaaactaagagtgaagtgtttcattctgttgaatcttttgagagtattattaaatcttggaaatgtaaatggaagcctcttgatggaatttctaccaataaagcatttaatggtcttctcatatatgtatttcgtgcatgggattccttttataggggatttgattttacttcatccattcataacgctatgaaatgggatggcgacaggcatttgattgctatgttgacggcttcatttgcaagtgcgatgtatggatgtcagtttaatataattaagaagaagtttgtaaaaggcaatgaaatattacacggttttaatatattagaccttatcaaacgcttaaaatacgactcttctgtcttttgggcaatgtatgaccgtgataataagttccgttcattttatccgaaaaacaatgccttaactaatgtagaatggcatcattggcagagtgttctgaatttatttgatagaataagttttacgaaggaggaacatcgactcattttgagatgttctcccaccggttgggataacagatatggcctatacttagatgatggttggatgtatgtttacagaagtaaatgcttgattggtcgattcaaattgaaacatgaaggagaaaattggatgataactgatacacagttatctggtgaacgatcgtggaaagatttctgccaggctttatcgtgtgcactaactgaaagttgcggattacgtaaaataaaaggcatatatgaagcggatagctacacctctttatgtaaatattaccaaggagaagataagtgtcccgatcaatggaaggatgatgttaagggtaggttttggtatggagagatgatgttctgtaaggagcacattgatattgaatactggagacaatatgcggaaaagatcatgaagtcattaagtaaggataaaaaagaacttgcccaaaaactttcaacatatcagtttggtatggtactttatatcgagacgctcttctgtaaatggcgtccttatgatgatatgaagtggatattagggtattaatacaggaaataataaatgatgatgataacaacaaaattcaaagagctaatgtctctgaatggtgaaatgaatgcagcagagatagagtcacgatttactcaaatagccaaattgctgtttgaaaattttgcaatacaaaagggagaaaaaatctatctttttaaagagattgagttttacttctacaataagcatcatcgtgacattatcactcatccccgtttctccgattctttatactggtacgtgaatgactttggaggtattgatttgaatttcccaagtgagatttgtaaaaaggatgggattgacagcactgggaaaaaagtagataagtatatattggatgatagctcttactttggaggcattctgatccgtcagttagtcagcgaggataaaagcgatattttagaaggcccctgggcttgtgcagagctgttcagacttcatcatgccttagaacaggacaataatttcccttttcttgtagagcgaaataacggtatgattggatatatctgtaaacccagattgaatcttctaaccggtaagcagactattgaaagtaaagtggattatatacttggagaatatctatcacatccagaccgaacagagttacacgaagcgttttcctcttttaaggataagcgatacagatatgtgcggtgtgaccagttgctacatgacagtgaaacaaatgaagtctatttgtcaccctggctgaaggataagaaggatggacatccggaattttaccagcgtctgactaatcttctgaagaattgcgacatagaacccaaagagttgaaatgtaccagagattattgggcacgcgactacatgcctattcagttgaatgagaatgagttcttgaagtaccaatattatccggactatctaatgaagagcaacaatccagaggatgctgaaacaagaaccgaatgtactaatgtactacgtggaatggggataaactgtcgttcaacaaagctaataattgacggcggaaatatggtcccatgtggcccttatattgtgatgacggataaggtgtttacagagaatggtaaagaaaaagaggatacagtgttcaaagctgagttggagtcagaacttggacatcccgtgattataattccatggaaaatgcacggtgactttaatgctcgtgatacagacaagtacggtcattcggatgggtttgtcaaatggtgtggtggcaacagtatcctgatgggtaatcatggagatcaatacccggaagaagctgctgctatccgacacattcttgaaaaatatggctttgaagtcacagagatgcgatttgcgaacaaggttggttcgccacggacagacttaaattgggcttacatcaatttcctgcaagtcggtaacaagattatcatgccaatattcaatattaatgaggatgctattgcttggcaatatttacatgaagcattccctgattgcgagattcatcaaattgaaatggctgaagtagcagaggaaggtggtgctttacattgtataagctggaacattcggagataatggaatttagcttagagaggaaaaactgcatttatattgacttatgtaattcatttaagctaattctttgtaaatttgtagattatattaaggaataaatatgagtagatatttaattatagtggtattggcaatgtttgtggccatccctcgaatttgtgctcagtcacaggttcgtatggctttgcctaagacgcagacgatggttcacaattctctatccaaaagcagggcaaacaaaagcaaaaggggaaatgctcaatttactatctccaaagacttgcttgctaagatgtttggattttgtggaatttcagtatcaaatgacactaccggtttggctttatccgttgatacttgtgcaactaaaagagatgtgaagaagtcgttgtcagaggctactaataatgagtttactgctttagatgtcttaaatatgttagtacctggtgcattctctgataaggaaaaagaacaatggaagtctttaccaaaggaaaccagaaaggcaattatggatatggtgttaactcctggggcaacacaatgggatgcccttaatgaggctcagaaggctgttgtacatgaatatagtaatgggaaataaacctgactgtcatgtgtactaaatataaattccactggtaagacaccgaggcattttaccagtggaattacatattcatgaatcgaataacagcataaattcagcatatcgtcgttgctcgatggaagcaatctttttgccacgccagtggcaatacttcacatagtcattttttatatttctgtctcctgaatcgagttttttcaggattatactctttgggtatttaccttttaatcctaaaagcttgaaagctccaatattataagctaatgctgcgagcaatagtgagtctttaccgtagggacgaaacaaggaacagagctctttaaggtctttacggagaagtgactctgattctgtggcagtcatctcggatgaatacctttctccgggtcgcagtcgatgtccatatccaacgtaaggataatctttttttcgatgtagtccctcatagtacttgatacaacagacggccctttcaaaaggtggaagctcaaaaatagttagggctttagagagtggctcagacggcattaccgtctgggcgttaactctcataccaaataagaatatgacaaaagctgctattatcctgaaactcattttactttaaattttgttatctcgtcaatcatgttcttgacatcaagattgacactcacgaagttctggtatagaatacgttccttggcatcctttgaagggaaggtgtagaatttcggaatctgataattcttgtagtttgcttcctcttcggcaatcttcttcatgtcgaaatcagtcttgcaatagaacttggaggtctggaactcggcagactcctgaatgttcatgctatcaccacgtcctgtcttggtcttgataaaatcacgagcagactggccacaaatccatccggtgggcatatccgaaattttacttgccggaacaaggctgtccatattctcattgagattgatggaggtcttgtcacggtcaatggttacacctttttttagctggacaatcttaccgaagatgtcgttagaaagccactctaaagtctcttttgctcttgctgagccactgactacgttgcccactgttgtgataactttctgcatacccactttcccataatcggattcgagctgtggcagttcctgaaagcccagtgtgacactcactttgttacttcgggcggtaccaatcagtcggtctatcttgtgaaaatagagagtaggcaactcatccactatgatgctcacaggaatattcttaccttgaccggtattcacacgggttacgagacggttcagaatcagtgcattcaatgcaccgataatgctttccatctccgggtcattggctattaacagatagctcggattcttcggatcagacaccttcaagtcaaagtcatctccatccttatgaaatatccaataggactccttggtggccaggcgggatgtatagacacgcagcgtaccaatcataccttccaactgttccatcgccttgttcttcatggctgtttggaacggccccaataggggagctacttcagggtctgtctccaatacctcaaagatggtctgatagtcttgattcagaaaggataggatatgaggcatgtcgctgtattttcccaaccaatattcaggttccacttccttgcctgtctggtcaaatactcggcctgtaggcttgggtcggtacgtcttcggttctgtggtcatctctgcaacgagggcatggccgtctttgtcgtaaggcacttttttatagttgacaaagaagtagatgcaggcagcgaggaagttcacagcagaagtctggaagaactggtcgctaccgccaccgccttctttcttacctttctgcagtgattccaacagagtttcagcagtttcgctggcagcagcaaggtttccgatgtacttctgttggataggattgacacgtctggaatactctacatctacaaagttgatgatattgaacttacagtccttaggaactttcccggccttctgattaatcttataatgatagtataatttctgggcaagtgtcggaaatttataatcgtacacgaccatggcaaagccctttgcgctgtgctgacggataaatggttcgataatggagaaagtcttacctgaacccggtgtaccgacaacccacgtgccacggaagggattgacaatgttcacccatcctttacggaattttcccttataataatagcgcatagggatgttgacactgtacttgttttcctgcaactcctggcattgttcaaaagactcattctcgaaattaaaacggtctttaagaagcccttcctttaagaacttggatatattgtcaagggctacatgtatacatatggtgccaatgattgacgcaaccatatacaaccagtagttcaaactgatcgtatagaatttcatacccatactctggccgtaaagccaaatagacaatattattataacgagtccaccaaaaagcggatagaatacctgatgacgagcatcaaattccagatgcttcttattacgtgttcctatacaggtgatgcagataagtataaaggtggctattttactccatataaggttgccgtcctgataaatataccaccgttttatacggccatgaatatcgcacagaatgccaccccaataatccagtagttcaggattaatggcatattcgaaaaattccactatcagtgacagataaatcaagtagcggaatattttatacgtggtctgtagttctttagtttcttccattcaagcggttctttaatcaattgtataatgtgatgattggtctgattttatgtgcttgttttttcggcgtttcctgaatggctccagaggcaagtgagaacaaccatgctttatcggtttcctgctcctttacttctgttgatgtccagtaccagcattcatcaggattgtcctgtatctcatctccaccacatttacggatatattcattaatcttatttcttacttcatacaacaggtataactgagcaacggaagggatgtaggcgctctgtccatattgccacatgtcaaaaacagcttcggctgcaggcgaagtataggtagaatacatggcatgggtattgctgttcccatcgaaggctgccaggtctgcggaagtatcatgctttattccaatactatcagagtaggcgcaaggctctatatctttcagatagactgcatatccagtaccttcaatatcctctttttgattgacatagaaaaccacggctatgggtgtcttttcctgtgctttcattttttcatatctgacgacttttccatcggtacacaggatgtctccaatcttcattgaggtatccggaaagtcctgatgtgcatcacatgatgctatggttgccgccatgaaagcggcacaaatggtgtgaaatatcttcatcttctttatctttttgatgtgggtattttaaatcctattactataccagttcggaacaaatccttacggtcagggacgataaggtcgcatttggcctgaatatacagtccccagccatgacggagtgataaattatgctcgtaaccggcatgaataccggcaatgaatttatctgtgtcactgcctccagaagctcctatgcgcagattcccgtaatggttacgtcctctgactaaacaaggtttgtatgcgactccaattccccatgtccgatagttgttccaaaatgaatcaggacagatatgaccacatgaagcacattcgtcccatttaatatagccgttgatgaaatactcccaagcgttatggtgacgtgtttcatgttcccatgcgatggtagcatccagcccacgttcataaagtgcaccaactcccaaggataaacggtcactgtgactttgtgcaaatgaagaaatggtacaactgagtaccattatcaatgataagatgattttcttcatggcttattcctccatcattagacatgagttgaaagagtccgcatacagcacatcttcataatcgatgtcaaggctgatggttcggccactgatttgtttctcagaaagttcaatagtcaggactttgtcattggggaaggtcatcttcttcagaactatgacatttctgtatccatgcttgaaactttgggccttttcgagtgccaagaccggagtcagctctatcatctgtgcgttggttgccttggatattttcttgtcgtttagcttgatgcgcaactcatcgatgtcaaaccgtatgttggtgcggttctctatgctgaaatccaaaaagaaatattcaccaactgagtagatgttattcaaccgcatagtcatacgatgctgtctggtactcacattacgtattctcgcaggggagttccatatcgttctggcatatctggtcatctcttctgtactcattgagactgccgggttgtggtatggaattttctcttccggctggatttgtttgtcagacactgcctcctgcatacgtgtggtatagatgagcgcatattgtgtacgatagcgttctgttacaatcgtcacaatggcaagaatatctccatcggcatgtatgtcagctccttctttaggtttaagacggatggtattgttgatgggctggtctccaacaacggcatcagtggagatgtcgacaaagcgtactggttctgtggctgtgataacagttgtcacattctcattaacggtgagctgttcgatttcctgatacgtctgctgagccatagaggggaggggtgccaaaacacataccgccaatgcgccgattcttttaaaagtcttcagtttcataatatctacgtgcttaaattatttttctttgttgtttgaatgagaattaattaggtaaacaaaagtgccatatttgagcttggctttattttttttgattgccttgctgacggcattactgcttttctggactgcattggaaatagcttgcgctccccatgatgccagactgtttccagatgtggttgtattggtgagtgtagatgtattgcttagcgcaccgctacccacgtcttttgtcgtttcacggaactggctgcttggaacatacagtccttctaatccgtctgtatcatagagggcaaggtttactttgataatctcaccatctaccatgatgcttgtaacattgcctttaacacgctgtgagccaaaaccgctcatagttgcataaaggtatgatcctttgggaacaacaacttcattgattttcacatcatctattaatcggagacggactcttgagccgtcaactgccttgatgttttcatctatgatggctttaattaacttctgctctttttcattctcacagatagtattgaaatagtcggacgttactctgactttcttgaccacttccaggggttcatcgttattttctttttcatcagacacttccagattcttttcattcctctttgtaagtgtatccgtatcagtcggcaaatttgtagcttgcagaccttgtaatctggcttgggcaatagcccggttcagctcctccatggcttcttgctcacgttgtttactgagggctaagcggtcttcttcagaagtaccgtcgccttgtgcgacttcctgacctttctgtgcgctctcctgtagttgtctttgcatctcagcgagtttctcggcttcctgtttctgagattccaattgtttaagctcttcttctgaatattttgaatcatactcttctttgttgtcttcttcattacggtcaatgtttcctaaagcagtatagtcatctattttcccatatgatttaagcatattgtcatacttattgccaattccatcgcctttcatgttggcatcaggcaattctgggttcagataatcagtcgtagtgagtccgttaggagtctctgccttctccgtatgaaacagatctatgacaaagtaaccgacaaacaacaggggaaagtagatgattattggaatcatatactttggctgcttccagttaattttcttcagtgcgtccatcgttctttatgtttacgttgttattattagattcgtcataggcggtagaaggtacttcgtgaacacggttggatgtttcattgcccttgttataatgtttacgccatatcaactcctgcctttctgtggcactttggacggattgctgcctgttaaacacaaatgccattctgtagatattcagacatagacagagtataataagtccgaaaacaatgacaagaaacagtttcctgtggttgttggcaaagttctgaaccattccggcaagcacatcaagtttcatcatacgtgcgaacttgcgaccggcattgacttcactttcgtatctttgcttatatttcggatcattcttatctggcatcttctctccgacaaataattttttccatcccatattagtagttcattttgttcttttgttcaatatccttattcataagtgtcctccagtttgtgatgagcaatccgtgagggttattgtcagtcctcggtacacgtttgagctgacctgtagtgaccagttctctggtaagaatgcttgtccgtcgttctatacgctgtttgccataatacatgaactccatcttttccttatcgaattttatactgtcgcagaatatgctgaacacagcactcgtacccataatattcgagtagaatcctttttctttcaatgtattatactgggcaagacctgtctcgtccactaaatacatcgctttatccattgtgtacttgatatatttgtcatctggagccagagtgaaaaacagatgatggaacatctcgatgtgagacttagcttctacgtcaagcgtttcgtccattgtgctccgatgaacaagaataggcacattgccgtccaaaacatagactttcttatgggcatccgagaccattgtcctagctgtccaaatgctggagatgcagatgatgatgcagcctgcaaggaaaagggaacatataatcagcaccagtttgattttgttttcaagattcttaattaccataatattccatattgatttattgcttacattactttgctaatcatgccttgggttgatactttggcttgttgtgcgactccttcaccaaagtttcgagttgagaatgctgtatcaccttccggtatcatccatgcggccaaatcaggtacaaggttgagacatttcaatgccacaatacttgcggccatgagatagccggctgagaagaacgagttctgcagataggcagccatagtctgttcactttcggtaatggcagtcagattctccacctgtatgcataagacaatgtcaaataggagcagtacatagaatcctacgaagtacagcatagctccgtagaagtgtacggtcagataacgtatgagccactttgcccaggcgccttcccatttgggcagaagactgaatgcccactgtattggtccgaagatggtcagcattcccaacaggatttgctggcagtagatagtcgcccaccaaccgatgcgataaactatcagagcgatgagcataatgattttatctagtccgaccactgcaccagctgtgagtgaagtaaaccatagtctggatgcgtccttttccatgttggtcacttcttcaacaccagtctgttccatcgtggactcaataagattcggatcggacgttcctgaatgtgctacgtcagcctgagcttgcaaggatgtatagagagtgtccctgacataaatgagttcctgaacttcctcaaacttatcttctatctgtaaagattctgcctgataaaggtcatgagtatatgaaccgatacagttaggaatgtaagaaagaaagtcaaggaaacaccagctacttccactgttggttattcccgtatctgcaggtggataccaccaacacagaataacggatattgccaatggccggaacagtttcatcacgtccagaggctcgtgcttcaccatcatcttataagctatatttccagccactacaatagagaacagagcagcgagagccatgcacatttggagaatccaccagaacggtccttgtgaacctgtgaatgtggcatctgtaaggaactcgtttgtctggaaaatcacgtcatcaatctcttcttcaagaatattgataccgaaatctgagagtatatttgaatctgccatgattttagtttcctttttatgttataattctctgttaattgtgccctcctgaatttagttgcccggcgtctcgccaacggctaaatgcttcggttgcatgagaagcaacatcagtccgtctattcaagcgggcagacaatagggaagcagttttgctcctgttgcttaattgaatcagatacgctataagaatttcgttctgatgctctatatcagcgtatatcgcaaggtattgccttttcctttgggcattgggcatataagcatcctgggttgctttaatggctgtctgaaaaatcttgtagtattcgttccatcgtgttttatcatttgccgtacctccagtactgatgatgcggttgatattcttttcaaagtctgatagctttttattcactttgctgccttctgcaagccaggcaatgtcaatctgtctatcggcaatattgagagcttcaatttcagcccgctgagtcagtgacgcttgaatgctgtcagctaaatctacctgttggtatgattctacaccagccagtgttctaaagctcagcttgtttttacttgctgccgatttttggtagctgttatgaaagagggtgtagtagaaagcaggggttagtccgccaacacctatttcctgaactgtaatctgattcatttttgttgcatcgtgattgtatgtcacataagattgggcaactgctttgaaacaaagcagcattgcacataaacataatgttgtccgataactgatagaatgtaccatatctgttgagttttaaattgttatttaatagcctaaatagcccgcaactttccaccggccaaaagcatcattaataatctcttccttggtctttgcacgataaacctgtcttttccaatatccaatgcgtacctgaatgtatctccaggtttcaaagtatgccctgttcagatgcgtcctgatattgtcgagtgagttgtttatgttcattagaatgagatagagatccgcagttgaacaggctgccgcaccggttgcatacaggattaaatcactgaccgaacgatacagattgtctccttcttcggcaatctttgccaaagcaccgacattgactgtgattatcaaggtatcagtgcttacaatgtttcctctgtccagacacttccttctgaagtcttcaagcatgtttttataatcacccatacggtcactgatgttttcgtaggtgttgtagatattgagactagtcctaagagactgatacagaatgtcaataacgtcaaacgcacgcgtgtatctgtcaagttccttattgatgtccctgaagccgatattggcatcactgctgtactcatgcagaagtttattgctcgcttccagtgtggatcgaacaagcagcagacttcgttgttgtttatggtcgttgatataggcttctatggaagctacatcaaaaccatattgagccttggcagtgaacgggaacaataccaaaaggcaaacaataatcggcattatgttattcctggtcgctttcatcttcatcgtatttaccattatatgtatctgagtgggcactggaggctgcctgacgcaaccagcgttttctacattgttcaatgagggtcaatcttctgccactgtcatcgttgatatatgggaccacgcttttcagcatatctatgatggaatgtttgtagtgcatcatcttttccaatgatacaaggtcggcatagatattggtgagtctcgtgtcaatctgacgggctatttcaagtctgtcgcttgaccagagcagatgataggtatcaccggtatcatcgacttccacaggactgcttttggcatattccacagaaggagtgcaatccggaaattctctggccacttctgataattttgaattgacctcgttggctttttctgcatccgatttggacggatcgagattgactacttcaacaacctgcgtgtcactatattctgtagtaagcgtccatgaaatctgtacgatagcacggtgtatcttaatccaaaggaaatattttggtttcctggctatggagatggttgccttaaaggttatggtaccgttgatgttgggcatggaggcagtacgaacgaatgtattgccttcccatgcacctgaaccgttccacgacagattataggctgttttacaatcctgcatgatagccggtatgcggtagtagtcatccgtggcagcattctcaccgtcgatagcttcctgctttgcctgttcatactgtgacagttctgtctcatacgagctcatctcagcttttagtcttgatattctgtctttgttctcattgtaggactgtctgtatattgcagcatcctcgacgcttgctgtctggatttttttcaggagctctgcgttttctgcctccagtgctgttatttctgattgtactgagacaatatttcctttcaactccgttatcttggagtctatttcagatgtattgatacttccttcggaaacacttgttgccatagaacattgcttggtatggttgtttacactgcttccacaatcagaacatttgtattgtgttgaaccttctcctaatttggcaccgtcatgacaggttacgctgatggttgctgtctcacatcctgaaatcttctgggcattggtagtctggtagtatttctttgggtcacttcccagataataggtatagccctcttcattatcgtttagttcagatagacgtgcgttcatacccgccttaaatgtattcaggtccatagtgtatgaatcaaatatgtcttcatagactacttccttacgattccagcttttggtagcatgaatctcgtaagcgtatgcttttgcatacaatccattctttgaagaattaatcttgtatgcgagcatataatatgagatgctataggtatagccatcattggctttatccagattggctatctgtgaacgactgtatcctgcatgattctcggagttctggagtgcagcttcacgctgtgcggaggatggataaaagttttcatctgtagtgctgattctgtaccagtgattaccgttgataattgagttgttgtcttcaggaggataatagtcgcaaagtttaatggaaccagcatctacacgatatatataccacctttgtgtgtagtactggccgaatgcttcattggcatagtctgtaatccatgccgttgtgttgtaattcgacaaagagaagagattggcgatgccttcctctccaccaataaactgcaacaaggtatttccggcattcttggaaagattgccgtataagtcgtacacattctcggctatctcaatgacactgcttgtcttgtccataatggttccgttaaaggaactgttcccaagaatggaactgacagcattgccagctccagccgaagcaaggctaacgcccatcgcatagaggttgtctatgtcttgctttaggtttccctttgtgaagtttgtaccaatatttgagacgctttcaagcagaacattccaatccacattgcccagttctgacaatttcagaattgctgcaagttcctggttgatttcaagaaatacgatgtccttgaatgacaaagtactattggtaacaatagactcaaactgataacacaaagtctttacctcatcacagatcttatagagatagctaccccaatagagggcattatgaggacttttaagcatcatgccggcaactgtccatattttgggcataattttggcagacaccatgttgtatatacggcggtaatagtagttctctgttgcactggtccaaagtcccagatttgtgagagctctgcggtcgaggaacttggaactgaagattccagcagcagccacttctgctgcctgataatgttccctgatcttggctatctgttgagcataatacgcctctgtagcagcttctgtaccgaaagccgccgacatttccgctacagtgcgagtatcataatttacgctgtagtactgtgccatagcaggtgctatagtacagagaaatagaagttgtattatcagatagtgtttcattttcaaatcttacatttctgtttttgttttgagattaagtacatgttgagcctggttcaccttttgtgcaaaggctagagacttggttattcctgaaagattccaatccctgcaataggcttctatggcatgctgatggtcacatttcaactctcttttatagagtttcaaggcttccttctcagctcgctctgtagtgtaggtcatgtagcattcacgtggctcttcaactccaaatacggccccgacacttccacgtcggataaagacctcacggaagaaacttcgtccttccttattctccaggcggttgatagtgaaaattttcttacaatcaacgtccgtcaaaccgagtgtggccttaatctcatcaaatcgctcacggaatttgctctggtcgagcagcattaccacgtctgagttattgatgatagcttccttgacaataggacttcctacaatatcctgtatttcctgcgttaccacaccaacagaagcccagaacttacgggctgtcttgtagagatactttatgtattcggccatcatcggagaagcgatagccttccatgcctcttcgataaccagtaccttacggttcttcttgattctcatcttctggataaacacatccatgatgataagcgtaacaagagggaatagaagagggtcatccttgatggagtcgatttcaaacacgatgaaggtttcatcaaacagtttggtgtccaggttctcattcagcgtcacctcatgactgcctcccttgtagaagtccttcaacagatagttgtaggccgccaagtcaatgccggaaagtttattttcttcaatgatttgcggtatgcggacaatactgtactcgtagaaggtattgaacgagagattcacaatacgacggttcacaaaatactcgtcaaagtactctttgatgacctgctcaataagacggtcttccgtcttggtaactattccctgggtgcctttccagataagcataatcagattcttcaagaaacctattttctcgatgttcagctcttcacgtttgatagcaaaagggttcattgtgataggatgctcttcggtgtaactgatatacttgccacctacatactcgcaaagtccctcgtaagaattaccagtatcgaccataaccacatcggtattctgttcccacatctgacgtaccacgctgttcatgtggaaacttttaccactgcccgaaggaccaagacagaagaagttagagttatctgtaatcttgttcttgccttcctttccactgatgtctattgcaacagggactccctgtctgtcggtatagtatattttcagaggtgtttcttcgctatgctgaatcctttccttgtacataagacatgcagctgcatcactaagggtcagaaaacggtcgtattcaggattggtggaataacaatttccagggaatgaattgacaaaaagctccaactgattgtacgactgtttgctgatgtggattcccaacttgctgaagagattctccagatgattggtacatcgctgaatatccgtatcgataggtactccaacgataagattgaaatgggtatataccaactgtttgttttctcttgcgataacatcctgtacatttttaatgtcctccacggcaatctggttgcttggatttggcatacttgcatggcggttcttcttcttttcaagcagagaaagttcttttttctggttggggatgaaaagcatctgattatacactactacctcagctgacggtatgctgtctaacaatgataccatgtctactggcatggaaacattgttcacctcaatgctcgtaaacggacgtaccaaagaggggacgttaatgcagtccacatccacgagactatataccttgcatcttttatcacccatagtaatagactcgtcatctatcttgaagttgttcatcgacaaatgtttgtcggtaaagttcatagagaaatagcggtctacgtaatcacgggctttattgccatcaagaaattgggcatccacaccggagtctttcaactggtctttaaccttacgtatcttaaccatgaaatcacgccatttcttgctgtcaaatgaaaagagattgctcttcttgttttcctgagtgataatcaggtagctctgacagtcggtataggaacgacctgtgaaatagttgaaatatgattccgacagaaattcatggttatcattgctctcgtcatgaaacttcttgcggataaatacatcttgtttgtggatggcatatccatcacctaaagtctgtgcaagggcagtgaagagatgattgaactcgtagtaactgtcaatgtcagccgaatatttctgtaccggattttccatcttcagaatggctgagtattcaccggtcttggtgtaaagtaccccgataccgttgacctcttccacagagaagtagatattctggaagattttcttgcgtttccctccagtaccgaaagccatgactgagattgccataccaataaggattgccacaaatgttaagatgacgtatagaatcattgttctttgaatttattattcgattacttatcagttacgttcacaatctgagagttgtcgtataaactatgttaggctcatcctaacgggagggtgagcctaaccacacactattcaaaatccaactctcttgctcatttatcatgttgaccgattacatcttatgtgcattagcatagatgaatacgccatgttcctctttcttggtgtgcaatcctttcctttgtttgaaaaagataagtgcagcaccagtgcatagagtgacagcaaggatggtgagtccggcaacaaatccgaggatgcaatacactatgataaaactgagaatacctccacctacagttgccgcagcccaggtgatatacctgccttggaatcccataaattcaaggggtttctgaagccccttgaacatgggatagctgacgtattgatgattgatcgattcctttgtcatgacgaatccatacagcttggttaatggttagacaccgaagaacaaaggcagagcctgtgcagcggctacaaggaagatacatgctccaacgaccatcatgattttcttcttgacatcctgttcttcattgttcattgcaatgtaaacgctgatggcaccgacaacggcaacgacaccggctatggcataacaaagcttcacaacgtatggaacatactttgcaatttcttccgtaactgttgtcagtgcatttgttccggctgtgtagtctcctgcagcattctgagcataagtggcagctactccgcaaaagagcaacatggccaatgttccaacacgtttagcattgaaaatccttttggttaaattcttgattttcttcattttttgttgttttacagttaaaaattagacacgttatccttacttgcttggttgtttattttttttatacaatattatagccaaagaaagctgggaaaatgatagttgctccaatcataaacaggcaagctccaaccagcatcattattgatttggtcacatctccttcaccggtattcattttgatatagatttgtaaagctcctataattgctactatggatgcaatagcatacagaagatatactacatagagcatcattgtgaccgcaaaatcatgggcgttgctcaatgcgtcagcaccccagctgtagtccacaccaccacatttagcaaatgccgactgaggctggagaagtatgaagccgaaacaggcaataaaaaacaattgattgattttacagtttatcgatagcattccttttctcaatttttcttttgttgtgtttgtcgttgagattttgcatgaactcatcaggataaaaacagtattgaggagcaacctctatctcttccatgttttcttcgttttccttattgagatctacacttgtagtagtctgtcgtgtgagctgagactcttcctcttcagggggggaactgttggtctgcttattgcctgttggaatgactacccgaaggccgtcatctgttacttgctctgtgtatgtcatgtcactaccttcaggaccattattatgttcttccacggaaactggcacttcttcattatccatactgctgacatcaaaggtctcttcatccgttttcttttcgtctttcttactatgaaggtcaagggtaatcattactgaaaagtaaaccacataagcaaaggtgaggaccaatacgaatattacaaatcctggcattctcaatctgattttaatgtgttattataaaaatattttatactcagaagataaaattgaaaaccaatttgctcctgtaacatgacaaaggaaatgagttttatggtattacgataaaaatatgccgatttgcatttcagtattaacatacatttgtttagaagtatgatattctgataaaaatcatactattagaataaaaacatcacaaaaaaggaggctctcctgtggggaacctccttaaactaatagaacagacttattatttttgttactcctttactattccattgatgacatcgttcagatctttgaaatttgggtatctgacagattcatcaattaccttgtctgaatattcgtctttgattctttttgttgtagctataccggcagcatcgttgtcaagataacagtgtactacatcatatacctggagatatggaaatgcagttttaatattgctgattgaattaagaacaatataatcacagtcgttttcaacacaaagttgtatatccatcatccattttctgatacttacatacgtgagcatatcaaagaaaccttcaaatatgcagcattctgaatgtgatttaccgttgggctttattacggatattgttttttttgcgatactgcgtttacagtatttgtttctgatttccataccaccatctacattttcaaaggctatggcataataatgtttatcattgatatgataatgtatttccttacagaactcctgagcaacctcgaagtcaacacgtctttgtaaaatatatcttttcaaattgggatgactgagcttgctaatacgatcaatgaaagtaatactttttctttcattacccttttctgctatatggctctcattccacgcatttcttctttgttgttctttggtcatcgcttcataatcttcagcatatttgagattatggttcttaatctgttgttcaagataagtaagtacttgatgattattccatgaagggtgcatcttctgaacaagatttataatgtttcctcctgagctggccccaaagtcattccaaagattttttgtaggactgacattgaaagatggagacgattctgctctaaaaggagatagataccagtaattacctcgatggatataggcatactgataaccttccgtttcaaggaactgtacaatactgactgattttatttcatctatggtcatggcatatcaataatgtctaattgggcttatataagtttagtatatatataccctgttaaacttaaactcataaacttactttaacggcaggagtgcaggatgataatgataaccgtctttgtctttggtaatcagtttgcgctcacagaagattttaagcatatccttaactgcattgtccccacgcttgtagccttcttgtgcgtaagcctgactgattgctttcaccagttcaagatacctctgtggactctcaccttcaaaaacagtgcgaagtactttggcatgtaagtcatctggcagagatgtcaagggcttatctttgggtttgactactgtaatatgatagccgtcatccaagacggggagagaattgtcgtcaatgtgaaatgcccatgaagaaaactccttgtctcgcatgtgcataggcctgacttcactgatgttggaatcctgtttgttcttgctgattatcagaactgtttcagccttgttttcaagttcggtaccaatatgacctctggtgttattgtcattcttgttaagatgcagcacgcaatggatgtgaagattgtacttgcttgtccaggccatgagcatagtcatcacatcggttgattctttggcattgttaatgtcatacatgagatctcgtaagccgtcgataatgaccaatcctacaccctcaaatgttcttagggcataatctatgagggcaatacggagagtaggagtgaactcccttagcccatagaacttgatgcgtttatcttcctttgtcagactcaatcctgcaaggcggtagatgcgttctatcacattgtggcagtgaaacctactttgttctgtatcgaaatagaggattttgcgtttaccatcaggaagactggcccggtatttaagaaccgttgaattgtttaccgctgctgcaaccattgctgtaatattaaaagttttcttgctctttgctttaccggtggatgcgctgaaattaccaaaggttgctatggtacaatctccaacccataaaatctgtggtggaacaggaggcttttcacatgcctttatttctccttgtctcaggtagttgtctaattcctggtcgttgaatgtactcttgcttagcattccgacttcaagagagctttccactgaacattccttatcattactgtttttccttcttatcatgacatagttcttttttattatcattttttgaggaacttatgacaacttctgactttttcagtaaagcagtcagttgagcatctgtataaacctcctttttattatgtttcttctttttcattgtaatattctatttatcattttttttgttttgctggcactacatgattcttacgcatccatctcaggagttcttgtctattgaaatagatggttttccctttgggcttaaaatgtggaatctgcatattcatagtgagtttatatatctgggattgtgatattcccaaatactttgaagcttcttcagtggtcaacatttctttaaccacatataatctttcctcaatctttgcaagacgttcattgagtatttctggattaatactattaagttctccaattttcatttccaagagttctaatctcttttttaagatgctgatttcaatgttactggttcccattttctaatgatttaatgttatacaatagggagtaccccaaaagctgaatcgattctggggtaaatatactcctattgttattttcgcaatttgaatgtctcctgtcagtttaaaatgtcagggagagtgtcagggatttttctttcaattgctttacattgtttcacttcaatacatttctttcagttgttttactatattcacatattcttcttcaggaaatgtagcagtagtattctttagttctgtaagacgtgaactgattgctccacgagttgatggtatcatacttttctgtggggctaacattttatttcttactacaagtgatacccaattatatggaatcattttttgttgggaaagagaatataacagctgaagtatatagcgcaagtttgtggctataagagtcttttttaatgtacagttaaagaacttttcaatagtattctcgtcaacaggggtagtgaagaaattctttctattggcaaaatctgtgataagtttaatttgctttctgttaaaggatgcaagtccattggagtcctttaatataacttccacatggttaaactcattaagcattttagagaagtctgtcttttcgaatgtagatttagtgaagtacttctcaacaagatcttttctgtcggtcagtaattcataaacacagaaaagattttggaaatgttttcgtattgcttcctcatcagatgtgaaaacaggaagatgataactgattaagtcatttacatagcgattgtaaatttttctatcattaattacttcagtttgataatgcttgtaactgactttaaataagtcccaaagctcatctttggacagctcaatctcttggtttgtgaaatgattgttacattgtaaatacaaaaagagagaacaaagagtgttgattctttttactcataaattaattttttttgtgtataaatatttaattctatttctatgatcatttgtttatatactatattgtaattatcactgatcactttgctaagtgcttttaagtgatatatgcaaaaaaaatagcctacattagataatccttaatgcgggctatttatgaattcgcatttctctactatttccttcgacttgatcttttgctgagtatttgattgatttctgctgtactgattggcttttcagttttacaaccagactcaacccatttgatgagatcatccctgaaaaatgtgtatttcttacctttcttgttgactggaatttgtccgttctgtatataacagtacattgtcgatttttttattttgagaaattcacaggcttcttttacatccattggaatgtgttcagatggagacttttgattagattgacgaatctcttcatgaagtatttctatggactgttcaagtagatcacattttttaagtatatctgacataactcttggtatgtcattaaaggttatcggattatcttctacgtattcttgcatatataattcttttaataatgaaactcgtaactatctttatcaggaatgtcaatttctattttacatttccctttttgtctgagtgtacgcctgatgctttcaatttcaacgtcattaagttctttaggaaaacagagcttgatgaaggtagctctggtttgtccactccaaccaagccgttctcctatattccaggcataatgtctgatgtcgagtgtgtttaactgaccatttgttaatacagaattgatacacgattctggaatctcgtaaagtttaatgttctggcatagggtttccagacaatcatctgtcatgtatggtgaaaaaacagtatatgtatactccttgattgcctcatatctgttaacctccaaatggtcctgtttatttttataaatctcacgcataatctctgctttattcttttctgaagtagcaggttgtagagaagtgatgctattattaatgattatgcgcttctcagtatgtaacctgtacaggacagttattatacaaactaataaagataataaaatgaggtataacaaaatcggcaatggggataacattaggttattattttctgttgcattagtgcttgtgactaccctgataatatatggagcggtcacaaacagaataatggtaataatgtttgaaatgagaagtatcagtaaattctctcttatcttttttgtcattgcaattggtttttatcgtattactttattgcaaatttatagataaacttactaattgatactagttgttactaataaaatctctctagaaaacattacctaagttcaagcggataatgcaacaggagtgagaatgatgacaatgagaagatacgaaaagaataatttttcagaggaacagagaaagaagatttctttcccttttgttcccctgtggaaaagttgtttctttgcatcttccagttccccaacattcagttgcaatatgaaacagctaaccgaagaacaaaggtataacatttccgcttatctgcaaagcggaaagtcaagaaccgagattgccaatcttgtaggagttcatcgtagcactataagtcgtgaattacgtcgtaatagtgataaacgtaatggcatttacaaaccggatctcgctcaggctaagtatatgtccagaatgcgttcacgaaagcacttcgtgaagtttacggacgacttgaaaattcaagtagatatactcataaagaaagatttcagtccagaacaagtgactgggtttatgcgaacaaagggcttggaaacagtttctcatgagacaatctaccagtatatttgggaagataaaaagcatggagataagttgttatacaagcatttaagaagacggggaagaagtcataagaagagaggtgcattgactaatggacgtggttttatcaaaaaccgcgtggacatagacaagcgtcctacgatagtagacaagaaagtacgttttggtgatttggaaattgacacagtcattggaatgaatcacaaaggagcactattaactataaacgacagggtaactggactagtatggataagactacttagcgggaaagatgccagcccgctaactaaagctgccatcgatgccttggaaccttttagagaccaaatacatacaataacggcagataatggaaaagaatttagttttcacgaagaaattgcacgtaaactaaatatttttgtttactttgcaaaaccataccactcgtgggaaagaggagccaatgaaaacagcaatggtttgattaggcaatacttcccgaagggtacggactttagggacataaccaatgaacaggtaatgcgcgttcaaaacatcttaaactcaagaccgagaaaaagattgggttacatgaccccaaaggaaaaatataaattattaactaacaatgaattcgacactgttgcattgtctgtttgaattcaggttatttatgtttcagtgtttcaatgatttacgctactatttattgtcacttttttgattttcctttctctttctttctcttggtttctgcattaacatttatgttttcattttcttgcatttccatttttacatttgttaacctaattctatcagctgcttctcgtgttttcggatcagcatgtgaagcatagatttgagtggtacttacattcttgtgattaaggagatgttgtactgtgtaaatatcagttccaagttcaagctgtaaggatgcgtaagtatgtctgaaacagtgaaaggtaatatgtttttttattccacattccttaatccaatcttgcatgactctatatgtcatagtacgattaaatcctgaaaaaatatatttatctgttgtttgtggctgaattagttcataagcatcatcaccgattggaacctgtgtctgacgctgagtctttacacatttaaaatcaagataatgtccgccatctgcatatgtttggatattttcccattttaaattgagtatatcacttatacgtaatccactcaaacaggaaaatatagcggcttttcttactactggaactgaacattctgagttgtatagttttctgacttcctccagtgaaaggctttgcttgactggtattgtgcatggaatattatccaaaagggatgctatgttatctacaagtcttctttccctataggctttagttaaaacttgtttgaagatattccaatatgctgaagctgtatttcgtgatataggcttgttaaccatgactttgcctcttgctgatactttcgtgtctaagagatattctttatacttgttacagaatacggtatcaagcatttcaaatgtacatttgttgtggcagaacctgctgaaatgtttataggctgcatcacacttcgcaaagtttctgttgacaatattcttgaagtatgcaagaaagtcctcctttagacggtcctggttaaagaagtcatatttctcattaattacctctatgaataccttacaccgaatagcttcagcttttgccagaatagcttcattatactttttctgttgtgtagaaatggggttggcatatatatacatgccaagcgaacgacgacgaatcagttccattgtttcaggatttctatagcctggccaaaagtccagaaataatgatttagtaccatttcgtctatctcgcatacggagagttactgatttacaatactgcatattatttgtttttatagttttatgtctcaaaattctcgaatgatatattgctgacatcggtaaattgaaagtaaatatcactatatatcaatatttgctataaaatcatcttctgagaaccgtttttccattaaccggtcaaattcttcttttctaaaaaagatgaatttctgcttctttactctggtgagcttatagtgattgacgtaatagaagacaagtgaatttgtaagattatatttctttgtagcttcttctacggaataatacctgtctctaccaacaaaatatccattctttatttcctctatgtgttgtttggaataataggtactaccatactcaacctttgctggaatcttatgtctatgaataaaagagcgtacaccatctgctgtcattttaaatgttgtacgcatttcctctggcgttatccagtctgtgatttctgcatacttattctttttgttgtataacaggtcaatggatcccttctcatagaaattaaatcctttcagtgctatcttaggtatgttgttctctcttgttataactccagcatgctttattgatattttaaacatctctgctacctcatcagtagaatagtatccttcaggagttgctggacagattttttcctgttgctttgccgtgaaaacaaccttttcttcaccatttgactttattagtggagttgaattttgaagacgttgatgcatgatattatcaaaatccgtccgataaatcatggtgaattttccacgcttttcagtcttaatgctataggtctttagagtataacttacctgatctttagttatgccatacttttgcatagcttcttcataagagtaccagtcaggatcaatttcatcggtcttgtgttttatacaatctatatgaaccttagaataataagacctgccatttctctttaccctgggaaccgcatggtattttacaaaacaaagagccgcaccctgagtcatattgtacatttccatgatttgactcaatgtgtaatagttatcaatgtctatgacatcaagaagctcagagaaatttgcgtcaataagctttttactgtagaaagtattacgcccttcgtaaactttagggatgcctaatctgtcacaacgtccccatacagctttacgtccaattttatacttatccataatctcttgtagggtatagtattcttgttcttgcttacgcttgtaacttctttttctataaggtcctgcatcctcaaagtatttgtcaagatcctcacgacggacaagggtttttctacgtattctcactgccttgatgattccggaatagaaacatctatacacagtgctaacactcatatcaagtaataaggcaacatctgagggtgtcaaaaatggtcgtgaagcaactgcatctctttctttatcaagagctgcttctttttcactttcccggacactttttttacgttttgcttcacgtttgcgagatgcgtcacgttcgcactctctacagcagtatttatttgacatcttggatgcaataaactctgctccacatgttaaacatttctttaatatcttcatctttttggcatgttaaaatcgtccatttcctttgcagcaattttcaggtatttgcaggaattttcacgaggtgtccaacatgtcaacgggcgcacatttatcacttttgcagtttttgcataaggtgccatatatgtcattttcccattgccatttggtcgcaaaatttagggataggaacgatatttgagccaaatttacccttaaaaactggttgtaacaagtttcaaatggaaagtgttaaaatgaaaaaagccaccaaaacggtggctttcagacagttagcgatatattgtaatattgttgataatcagctacttaccgatgcaaaagttttgaaatatattttgcaatgtttcttccgaggttatacctccttctgcaacaatctcacttagttcgtggatacattgtcttaaatcctcacttaccaaatctcctgataatcccaattgcaatccttcctgtactctatgaatagaatccaatgctcgtgttaatgcttcgtaatggcgtacatttgtaatgataatatcgttttggttgatttctggtaaggcggctgcctgtactaactttttttccaggatcgttatattttcccttttctttgctgagataaatagtttttccactttcatgtcagcaaatatagctgacaactcttctttttgtattgctagtaacagatctgacttattaaataaaataatcatctttttcccttcgcagtgtggaagaatttcggcttttaattcttcgaaccgtctttgggcatctgtagagtctatcatccataaaatgacatatgcttggtccatcttttggaaagtacgttctatccctagattttctattgtatcgttcgtttggcggattccagctgtatcaataaatcggaatgtgacaccttgtaaattgatcgtatcctctattacgtcacgggtcgttccatggatatcactgacaatggctttttcctcattcagcaacgcattcagtaaggtggattttccagcattcgtctctccgataattgctacaggaatgccattcttgattgcgtttcctacactgaaagaatgagctagctgggcaataacttgttcgatatgggtagctagactgctcagttcgtcacgattggcgaattctagttcttcatgatcactgaaatccagttctaattccattaacgaagtgaaatgaagcaattggttacgcaggttagaaagttctttactgaatcctccacgcatttggctcatggctaggcgatgggtggcggcagacgatgaggctatcagatcggccacagcttcggcttggctcaagtccatttttccgtttagaaaagcacgttgggtgtattcacctggtagagcggcacgacatccattatagatcaggagttgtataacttgctgcaggatataggatgaaccatgacacatgatttccgtactgtcttcaccggtataagaatgaggggcacggaacaaagaaattaaaacttcgtctattacttcttctgcagaaggtataattgattcttttttttgtaacgtttcacttttttcttgcggaatttcactcgttttttggaaaagtgtattattaatttttcgctttggggaacaaatctttccgaaagtaagagtatatggtgctcgttctgtcagtagcttgcctgtggcgggtgtaaatatgcgtgacgttatttcaatcgcttttgggccagatacacgaattattccgatggctcctccctgggcggtggcaatggcgcagattgtatcttggtttatcattttcatttggttaataatataatgttttagctacgatggctgttacttcttctaaataacggcggtctgtctcatcaaaagagtttaatagattactgtcaatatccaatactccctttacttgtccattagcaagaataggaacaacaatttcggagcgggaaagagaactgcaggctatatgtccggggaattgttctacattgggcactatcaaggttcgagcttctgaccatgaggttccacatactccctttcctttatggatgcgataacaggcggtgcttccctgaaaaggtcctaaaataagttggccgtctttaaccagatagaaacctacccaaaaaaagccgaaggcttcccgaagagcagcggcagtattggccaaaacacttatttcttctttttcatctgatattaaaagttcaaactgagggaggaaaagacggtaacgttctactttattactagttgtttgtttgaaactggtttccatatttttatttgttttatgaggggacatcttgttgtttttttacaaaaaatggtcttctatgaagcgatgtcccctgttaggtaaaaagagttggcttattctgtaaaaaatctgtttatgccaatcttcttctcgatgataataagaataagtattgatagatgatccggtgaattttatccatattatatagacaactaaattgggaattatattctttccaagactttttctatcaaaccatcaatagagtttttatagccggtattggcttcctttattagtcggttggcaattaccatacatacagtcatggctttgtgtcccatcaggcgtgctaatccggcaagggcggaactttccatttcaaagttagtgatgcgatagtctttgtattcaaatttctcaatcttttcattctgttcaggatcggccagtggaatacggagttctcgtccttgcgggccaaagaaacctcctgcggcgatagttatgccacggaccatatcattttgcgcgatgcggtctattaattcccggtcggcatcaatgacgtatgggtgggcgatgcatacattaccttcccaacccatgtaatttataaaagcttgttcgaatttcagatcgcaaacctcattgcgtccggcgtagaaattgagtagtccatcaaaaccgatagacttttcagaacaaatataggtgccaacgggagtataaggctgtaatccgccacatgtaccgatacgtactaattccaattggcgtaagtggtctttttcataacgggtattgaaattaatattggccaaagcatctaattcattcatcacaatgtctatattgtcacaacctataccggtggaaactacggtgagacgtttccctttataagtaccggtaatggtcttgaattcacggctttctatttcacattctttagtttcgaaatgagaagctactaatgctacacgcccagggtcacctactagaattattttatttgccagctgttccggtttgatatgaaggtgaaaaatagagccgtcgggattgataatcaactcagattctgcataatattttttcataatcttttttttgtggttaatggtctgtataattgatgttatatttcttgtctttttaatgggtatacaaacagattatttcttagatgtagatgccacggatttataaactttcattgatattagcatgataaagagaaaaacagtttcattcgcatccaagaaaaatacattaatcgttgaatactagttttatttgcttaatggttcattaccgaaagttgtttcgggttttgcaatattttcacgcatggaggtatctgcttgtatattcttcatgcggtaatagtccataatgcctaggttgccactacgaaatgcttccgccatggccttgggcacttcggcctctgcctgaattacattcgcacgggcctcttctgctttggctttcatttcctgttccaaagcgacggccatcgcacggcgttcttctgctttggcttgtgcaatattcttgtcggcattggcctggtctatttgtaaagcagctccaatatttctgcctatatcaatatcagctatatcaatagacaggatttcgaaggccgtaccggcatctaagcccttgcggagtactaatttagagatagaatcaggattttccaatacggatttgtgattttcggacgatccgatagaggacacgataccttcaccaacacgtgctagaatcgtgtcttctccggcacctcctactaattggcggatattggcgcgtacagtgacacgagctttagctataagctgtatgccgtctttggctacagcagtaacgggaggagtgtcaataaccttagggtttactgacatttgcacggcttcgaatacgtcacggccggctaggtcaataccagttgccatttggaaagacagttcgatgttggctttggatgcggatactagtgcgtgtactactttttctacatgcccgcctgccatataatgagcttccaattcatctcgggttatgttacttaagccagctttatgtgcttcaatcattgctgggacaatgacataaggaggaacattacggatgcgcattaagaataattgcaccaatgaaatgcgtactcccgaaactttggcagacagccagaggaaaaatggtacataatgaaagaatagtaccacgaaaataattccacctcctataaggatgaaaggaagatagttgggttcgatcataataatcaattgtttaaaagtaaatatttatatttgaacagctccacatcgaatctctgctgttttcactattgtctaaaatatacttgaatgagaatgtcaatcaagaaatttgataaaatcgtatttgtaagtcatttttctatcataggttgaatttgcgtacaatcaccgttccttcaaccattctttctacataaatgggggtattctcatcaatcaagccatcggcagagcgcacttcgatgatgtgtccattaaagtttgcattgcctatcagtgcaaggcgggttattgctatgcctttgtctccgatgcggatatgggttccttttaggggatcgattttataatccagtgttttcttcaaagaaagcttgtccatggtttttgagtgcataaaccagatgataatggctatgcaacttaggacggatgctatcaaagtaatgaatcctgctatcggtcctaatgtgtcgaaagcgtaatagttggcatatagcaggcagatggccgatgctattccggctatactgatgccgggaataaggaaaacctctacaataaagagaagtactcctgccaagatgagcgctatgataataaatacttccataaatatctttgtattagtgtttcaacttctttatttcttcgttgcggacgctgatatccagttgggccatttctttcagaagttgttcagtacgtttttccaattccaaaatggcgggtgtcaaattcttctttcgtgcactgttcccttgggcatattgttcgcgtttgtcatccagatttttcttcaggttgtcataatccttctgcttttgtattctttgctgataaagtttacgtgcttcggcagagcggaagtcgttcaatgtgtggtaaacagcagagtcatctattatcaaggtgaagtctttttgttgttctccggattctttggcatacattattgccgctaggcgttgcttgccggttcgtactttctcttcatctttccaggtggtacggatagaatgtaggctggctgcatttataatgatctgttcgtctgtactttcgtaattgtatacttcttttgaagagttcggtacaaacacatagatacagactttgttatcaggctgatagcggtctgaagcaaaccagccaatattgttgaattcatcaatggcatacatatagtcattggcgggagagttaaatggcattcctatattatcgggacgaagataattgccattttccgaatcatagcgagttacaaaaatatcgtacccccccaaagagccttctccatccgatgcataatacaaggtaatgccatctgacattaagaagggatagtttacatttccctgttcattaagggacatgaggggttcgggctcgctccagccgtccaacagacggatacgggagtagagttgcattttgccgtctgtgcttttgttcccgtaaagtactttattgcccatttcggtttgatagacagtcccggatatggtaggatcgtgatagagtgctcccgattctctactgattttatatgctttcagaaaatcatttttatcgactacaaaactatctattacagtaatgttttccactccttttatcatacgggctgcttgctttatttgttccagctctgcttcagccatttcggtagggcgttttttcttttccaaccattctatgtgttgttcgtagttatctacggcatcgtcaaaccgatagatatcataatatagtttccctaaatagcggtatgcgtcaatgactttgcgggcggcgcttttttcaaggtagggctgtgcttcttttttttctcctgtttcataacaacatgcaccataccaataattataattggcattagaaggggcttgctttaccagcttttggaaagctggtttggcttgttcaaattctccgttcaggaaaagttgtttggcttgtgccaagctttgtgccgcagtgttgcctgcgcagcataaagtaaataaaccaatgatatattttttgtacatagttagtttataatccgtattatttagattcaaaaatacaaagattaattggaattctcatgctttaataattctattttgttaaatcttccataaatcattcttttcatgtacttttgtgccctatttttaaagaagatgtatggcacaatttacggaagacgagaaaataatgcgaaggttggagcaacgctttaacaagggggtggtaaagtatcgcttgattgaggatggtgataaaattttgatagctctttctggtggaaaggattctttggctctattggagttattggcaaggcgttcacgtattttgaaaccgaaatttgcagtgatagctgtgcatgtaggcatgacaaatattccttatcaatctgatttggaatatctgaaaggctactcagaggatttaggggtgccgtttgtgcattatgaaactttttttgatctgagtaccgatactcggaagtctccctgtttcctttgttcttggaatcggagaaaagctttgttcacggtggcaaaggagcaggggtgcaataagattgctttaggacatcatatggatgatatcttggaaactttgttgatgaatattacttttcagggagcgttcagtacgatgcctcctaaattagtgatgcgtaaatttgagatgacaattattcgtcctatgtgcttggtacatgaagcggatttaattgaaatggcacgtatcctcggttttcgtaaacagatcaaaaattgtccttatgaaagtttgtcgaatcgttcaaatatgaaagatgttttatattctctagaaaaaatgaatcctgaagcacggtatagtttgtggagaagcatgacaaatattcaggaagaactgttgcctgggattgaataacaatgatttatagttttatatcactgtttatctgtatcttgtttttttataatagtctgttataagaggttatttcgggttatttatttatatttgtgtgcaacttacctgaattcaaacagacaatgcaacagtgtcgaattcattgttagttaataatttatatttttcctttggggtcatgtaacccaatctttttctcggtcttgagtttaagatgttttgaacgcgcattacctgttcattggttatgtccctaaagtccgtacccttcgggaagtattgcctaatcaaaccattgctgttttcattggctcctctttcccacgagtggtatggttttgcaaagtaaacaaaaatatttagtttacgtgcaatttcttcgtgaaaactaaattcttttccattatctgccgttattgtatgtatttggtctctaaaaggttccaaggcatcgatggcagctttagttagcgggctggcatctttcccgctaagtagtcttatccatactagtccagttaccctgtcgtttatagttaatagtgctcctttgtgattcattccaatgactgtgtcaatttccaaatcaccaaaacgtactttcttgtctactatcgtaggacgcttgtctatgtccacgcggtttttgataaaaccacgtccattagtcaatgcacctctcttcttatgacttcttccccgtcttcttaaatgcttgtataacaacttatctccatgctttttatcttcccaaatatactggtagattgtctcatgagaaactgtttccaagccctttgttcgcataaacccagtcacttgttctggactgaaatctttctttatgagtatatctacttgaattttcaagtcgtccgtaaacttcacgaagtgctttcgtgaacgcattctggacatatacttagcctgagcgagatccggtttgtaaatgccattacgtttatcactattacgacgtaattcacgacttatagtgctacgatgaactcctacaagattggcaatctcggttcttgactttccgctttgcagataagcggaaatgttatacctttgttcttcggttagctgtttcatattgcaactgaatgttggggaactggaagatgcaaagaaacaacttttccacaggggaacaaaagggaaagaaatcttctttctctgttcctctgaaaaattattcttttcgtatcttctcattgtcatcattctcactcctgttgcattatccgcttgaacttaggttatgtgcaacttaaatataaatattatggcagtattatcaatttacttggatacgaggaagaaaaactcgtctgatatatatcctgttaagttcagaatatatcataataaggctttttttatatcgtcaggaatgtattcaaatgttaatacatgggataatggtgagtatgggaaaaaagaacccaactataaagtgaagaatatggcactccgtagcaaatataatctcctagaatcagaattgctgttgctggggggtaaactgaaaggtatgtccgacaaacagcttaaagaacacctttctaatattatttcattaaagcctgttacttcatgtgactttttacgttattatgacgaatatatctcgttgaaggataagaagagcactaaggataattatataaatacacggaaaatgatagttgaatttgatgacactcctacctttgagacaatagaccgaaagtggctgacatcctttaaccagttcttggtggataaaggatatatgactaattatataggcacacatttaaaaaacatcagggctgtctttaattatgctattgatgaagaagtgacaactctttatccattcaggaagtttaaaatcaagagggaacaaacgaggaagcggagtttgacgattgatgaattgaaattgttgaaaaattatccatgtgaagaatatttggagttttaccgtgatatctttatgcttatattttacttaataggcatcaaccttgaggatttgctttttctcactaaagataatctgatgaatgggcgtattgaatattacaggcacaaaacaggaaaattgttttctataaaagtggagccagaggcacaatctatactggataaatataaaggtgatagatacttgcttaatattatggataaccgtagtaattatactagttttactactagcattgacagagcattgaaacaaataggtgaggtctctattttgaaaagggggaaaaagatcagaaatcctcttttcccaaaattgtccacatattgggcaaggcattcatgggctacattggcagcggaacttgatatacctaaagaaactatatctgccggtttaggacatgagattggttctgatgttactagtatctatatcaaattcgatcagaagaaggtggatgatgccaataggagagtgattgactatctgtttggaaaagaaaaagccggggaatgatgcccggcttatatcgttggtttagaaccgccacttattttggttatagcgtcatgctctgtgttttttctttgtttctcatcctcgtctttgagatacttgttccttatatctttgatgtcgtttgtcattccccatactttgaagaagagaataatttgtaaaactccgaatattaggagtatgatggttagaaagtcaatcataatcttgtgtgtctaatttgttattttagccattttgcaactccaccatgatgtgagcatgttcctctacggcttttgctaaaactatatgttccatctctacataaagctgttgctccaggaggcgcggaattataataagttggagattgtactcgttctccctttgaatttgtataatatttaatagatgtactgttattgtatgtagtagtacattcaattttttcttttgaaaggtattttgtcgaaacatatcctatgtatccattatagtttaccggaatccatttacattcacagtcttcatctatggtaacttgagtgcctttaggtatttgagtaataatagcagaggttgtattaggagcttctctcaaatttagatttgccataacatatcttatagtatcttgctgaatggaaagttgagcatttaacaagcaagaaaataaaaaagaaaaaaatagtattattcctcttttcataatttcaaatatttagtttgttctttaattcgttgaaagtatctggattctcaaaatctccccaacagtatttcttgtatctgtcccggtcgaagctgtcttttttctcataaacaatcaggtaatccttatcacataaaacaatcacagaagaattaagtaatcgggcgtatgagcgcgcttgcaaatatgcttcttctctttccttgttattcctcatacacagcttggcttcaatcaacacttttgccctttcctcatttggtttattgccataatgtaacgcataatctgggaatatcctatgtcctctccctgcttggattggtaactgccggatgaagtctttgttttcataccatcccatagagttaagcaatggttccagcaattgctgttctacatcatgttcgtactctataattacgtctttgggcaaggttggggcatacaattttggcaaaacctctatatcaaatccttttgtttttatcatccgaagtaactctgaatagttctcactgttaaccgaccaaccatttactccctgaaagttttttctaacaagtgggtgtttgaaaaaatattcatcagtttgtagttctttcaaagtaatgtgaggaatatttattctattcccaatatagatacacccgtagtatcggaatagagggtctattacgccatccgtaagcgatatctctatgcaagtgattgcactgattggggacgtttcgtaatgaacaagaatatcccctttctttgtttcggggcttgactgccagaatttcgattctaaggatttatcttcttggtataacctgccgccaatgaaccagacttgtgacggtttgggcatgtctattttctcgcttgggagattattgggtgcgaagtcgtataggaaagaccatagatctgctggagatagtccattttcttttctgaacaaataaaacacctcgcaaagttcccaataatacatgcaccttcctttgtaatcagttcttttgggaatattggggaggtctatgttaaagaaatccgctattttattcagctcgaatattcggcaaaggaacaggtacgggaagaaatattctggggcgaactgtgataagacatagtatggggcacagaacgaaacgtatattgaggattgagcggaaagaatatcaaacctattgatatacaaaatgttatgcaaaatatgagtggatggctctgcaaaacgaaacgtttacgtgggtttaatttgcagctacatttatgtgctttttaggcatacagatttgcagataggtttaattgggtttacataaggcttacatggttgattctggtgggggagtgagtggcagctgcggctgctttttttgtgcctgattatttgatataatgctgcttaaattattccatataatagttatttggtatatttgcgacaaaatattattagttatggcaaaggtaatacatatacatttgacacacggaatagaaggaacaaagcggaaagactggtattttagtagtataacggccatttatactgttttgacggcagaacaggtgggcgcaacgaagaattatctgcttcatgcaggattatctggtaacgggactgtatgcaccaaaaaggctataataaagcaatctacgctcatttcttgcgggcgtagtggaaatgtatcagacgaataataagcggctaaaaaggcaataaaaacggctttagaatgatccggtgtggggaggtggttatacctcccctttttttgtgcttgaaatcggtcttttttgacgctggatattcaggtggatattcaaagtggatattcacttttatagaactggatattcaaaatagggttttggcggtgtgcgatacagacatgctaaaataccacaattttaaaaataccccttgttttttatttgatagcccccccctaaaaacctatcatttttcacgttttactttttaaattccccaatatcagtgcctttatgcccttatataatggtaggggagggggattgcttgggagggggacatcatgggggatgatagggggtacgcttcgttttccatcaccggtgtatggtaatagtaaatccgcctacccgacatttgcagtaccggaaatgggcgcatccgatacatgtttttccttttcgattgtcatttgccggattcgttcctctaagcgtccgatttctctatcttgttccctgatgatttcttctttttctctaattaaggcaaggagagaggatagttcggttgtttgtgttgttgtagatgatgtattatagtaaatatcacctttcccagtaagtaaccaggtagggtttatatcattatgtatttcgataattttcgacacccataaacttgatatatctgttcctttgctaatgcatcttgaaattactccattcgagcacccaatagcttgttcaagtgcccttgtactgatacctttttctttaattaggattgcaatcctgtcggaaatattcgtcataagtcgtaaattatctacataaaactttttagtgtcgaaaatattctatatatttgcagcgtgttcaaaaaggaacaccgcgccaaatatacgaaaaaggcatgtgattagcgaattttaaggattaaagaaaatgaacgaagaaataaaagaatggcagacacagagcgtgaagcacaaggtggcttacgtgttgatgatggacggtatcagcttcagatataccgaagagaccgggattgtgttttccgcacctgatttttatgtgaagaaccttatccgccgcctgatgagttgttacggcgtgagtttgaaaccgattataaacgaatttaaataagtgagattatggaaaacaagaaaatgagttgctgggattttgtattcagttctgtaaagacccatatagatgatttggtaagacaggctgacaagtacaccaaagacatgaatgaggattttgaacatttcttctgctggtatgccgaggatatgtacaagacgcaacgtgaactttcctgttaccgtgccttgaaggtggttttatctgccggtagccatgatgatgtaaagttatacatggaaagcaagataaacagtctgactgatagtcttcttaccggaagcatccgcaagaacagcaccagtgcggcttcaaatttggcgcatacgttggaactggaagtgaaccagaagatacgtgagaaattcactatacttcttgggattattgaaaaaggtgaaaaggttgagggacaacagtaaacccagcgtgacaacccggaaggcgttaagagacgggtgacggtgtggaaagacacacgggagtgcatggttcttgtgccggggttcgattccccggactccccccaatattaatcattaaaacaagtgagatatgaacaagaggtacattcacattacgaaagccgaccgcgactttatcgcaaaggcactcaacgtgacagagaagactgtttataacgctatccggtttgatgaccgtcgtggcaactccgaactttctgcaaagatccgtaagttggccatggatcgtggcggtattgtgatggttgttattccggaaatagaaactttccatgattatgacaatgtgatgcgtcagtactgtccgaacggtgccttgatagagcttgaccgtaatgatggtagcggtcaggtaatattcaagggagaaacggtgaagacttacgagcatgtgatggttgccgatattaaccaaatccaagcgtttgcatcggcattgagataggaggcggctatgttggtgtattacggtaacatacagtgtatttctgcacgtgagctcatagatggcggctatatcaccgaatcctgctacaggaactgggtgaaccgtggccgtatcaaggtggtgcgtcgtggtggaggtgctgctggaaattgcgcgttggtcgccctcaatagcctgcctaccgagtgtctggaacgggtgaaggaagacaaccccggtggaacagagcaggcacttcgccactggatactctcaaactatgtgctggatcaggctgcagtagcctattttttggattgggcttctcattcttccagcaacagagcaacagacgaacttgcccggaaatatgcggtgaatgcttccgtgttgaatacttgtatcaagctttataacagaaacaatgattaccgaaaactgatgggtgaaaaatataactgggacatgatggccaccaccatcgagaccctacgcgaagactttggtcatgatcttcctgccagtacccttcgtttccgcaagaaagtgaacgaatataagcaatacggttatgaatgtttgataaccggaaaattcggcaaccagaacaaacggaaggtaactcacatggacgaacgcctggtgatgagtttgaaagtacttcccaaccaaccatacggcagtgatgtgcatgaaatgtatctgtcgtttgtatgcggtgaactggaagtatgggatctggaaacaggagagatattcaatccggaaaactttacggataagaacggggaaccgaaagaactgagcgaaagcactatccggaacatactgaacaacccggcaagccagctgctgatagaaaaagccttgcgtggacgtatggaattctatcatgagcaaatgccgcacatgcaccgccatggtggtaagttctccctgtcacaaataacgatggatgacgtggatttgccgcgtcggatgaaaggcggcgagtatgtgcatgcctattatgcttatgatgtggtgagccagtgccgtatcgggctggcctacgggcgggataaggatgatgccttggtagtggactgttttcgtgatatgttccggctcatcgaacgcaacggatggggtattccagccggtattgaggtggagcagcacttgatgagcaagtataaagaaggattcctgaaggcaggtgaggtatttaagtttgtgcatttctgtgccccacagaactcacaggagaaatatgctgaagctctgaacggtgcgttcaagacaaccatagcacataagaaccatgaagccattggtcgctggcataacaaaggtgcacggcgggtggaccagaagaaagtgagtgacagcagcaaccacacctgggaagacagaaagtattatacgtttgaagagcttgtggcggacgaccggcgcgattgtgaagaatggaacaatacgcttcaccccaatcaaaagaaatatcccggaatgacccgttgggatgtgctcgtagccaaaatcaatccgacccttcgaccgcttgataaactgaccttgagcagatatatcggagaaaaggtagataccagtattcgtagaaattccacagtacgtgtggcaaatgcggactggtggctgagcggtccggaagtgctggagcagctggaaccaaacaaccgcaaggtgacggcttactatctgccggatgaagagggcaagcctacggatgtcttcctgtaccagaacgaccgctaccttgacaaggttcgtccggtagtgacttacaaccgggtgatggcagaacagaccgaagaagaccgggtagcctatacagagcaaaacaaagttctgagtcatttcagcaaatacctcaatgaccacgccatcggaaaggtgggaaccggtacaccggatcagccaacggatgacccggaagaggaactggaacttcccccggtggaactatccgatgatttgccagccgaattgtcggcagatccggaatcagattatgaatggcactccggaataagcgaggcaatgagggccatcagtgacatgtaagaatagaattagaacaacattaaaacagcgttagaattatgattacagaagcgcaaaaacagaagattttagcagcgatagccgccaaccgtgcgaactatcccagtgatgccaagcatgctgcctctttagccatcagtacatctgtgtacagtgcaatcaagaacggacagacagacaaagccctgagcgatgccaactggataagcattgcccgcaaattaggggtgaacctccgtggtgaaatggaatggaaagcagccaagaccccgacctttgaatatataactgcccagctggagttctcacagcagtccagtctgtcgggcatcttgtgcgacatgcccaatatcggcaagactttcacggcacgttattatgtgcaaagccacaagaatgccgtttatatcgactgctcgcaggtaaagacaaaattgaagttggtacgcaagattgctgcagagtttggtgtggacagcaaggggaagtattctgatgtgtatgaagacctggtatattacctccgttcgatggaaaccccgcttatcatcctcgatgaagcaggcgacctgcagtatgaagctttcctggaactgaaggccttatggaatgccactgagcgctgctgcgcctggtatatgatgggggcagacggattgaaagagaaaatcaaccggtccatagaatgtaagaaggtgggctataccgaaatgttgagccgttatggtgaccggtacagcaaggtgactccggatgatggaaaggagcgcgaacagttcttgaacaaccaggcacgtattgtagccaaggtaaatgctcctgcgggggctgatatagcccagattgtacggaagacatgcggtggtttgagaagagtctataccgagattgagaaacttaaaatgacagcggaataatgaagcgtgcgtacagtccgaaggaaatagccgccaagaaatgggttactctgccgtgggatgagaaatggagcaaacctttcgggttcccggcagagaacgcttcgtggttcatcagcggtgccagtgccagtgggaaaagcagctttgtgatgcaacttggaaaggaactgtgcaactatgggacggtgctgtacatgagttacgaagagaaaatcaaccaaagcttccaacggcgtatgggttatctgaagatgaatgaggtgcagggtaaatttcgtgtggtgacagaaggcagtctggaggaagtgattgccagactgaaaaaaccgaaaagcccgaagtttatcatcatcgattcctttcaggtggccggatgggattatccgcaggctgtggaactgatggaaacctttccgaagaaatgtttcatctggatcagccaggaaaagaaaagccagccgatgggtggcggtgcagtaagattgaaatatatctgtgatatgaagattcgggtggtcggttataaagcttattgtcaaggacgcgccattggagacccgggaagctattatgtggtatgggaagacggaatcattcaaacaagtaataatttaccaaaatgattatggataataacgagaaggcttttgaaagctacaccggaactgaagtgttccagatactgctggacggaaattccagccggtccgtattggatgactggctggagcgaaacatccaaagcgacttaaaagtgagaagagcgaaaatgcccggtcatgtcgtaatagaaacgggtgatgtcttgtttgcacgtaatgtgctgatatggaatccaagttgtaaagtaaacattaaaaagatttgaagtgatggaaaagaaagaagaaaagaaagtgtgctgcatctgcggcaaagagtatgagggctacggatacaatccgttcccggtgaaagaagaaggctgctgctgccaatcgtgcaactacagtgtggtcgttccggaacggtgggaacggcacaaggcttatcagcgcggtgaggcgaccggtgccgggaaggtgtacatcagcggagctatcgcgcattatgacatggatgagcgcaaggaagccttcagccgtgccgaggaggaactgaaggcacaaggctatgaccctgtaaaccctttcaggaacggattgccggatgaagctcattggagagcccacatgcgggccgacattgccctgttgctggcttgtgactatatctatatgctgaaggactgggaactgagcaagggagccaaactggaacttgacgtggccagttcgtgtggcattaaagtgttgtttgaataaaattagtcgatatgggaaaaataaaaatggaaaccggtgttgtggtgatgaagttgaccgctacggtatatagaggaacaattcgtgaaatccaatcctcacgcataggtttttgcggggagtacaataaagaaatactttctaaaatgggtgatgagttcaaaaagatatttgctaagcaaattgaggctgaatacaaaggtaaatcagtgaagccggataagataatttatcgtgtcagtaccaaatcaacggaatgtgaaatgattcttaatggtaaatgacatggcacaggaagtaaccaatttcgcccggttctacacattgttcaacaagcttccctgtacaggagaccgggaagaattcaagaaaagcattgtgctgcagtacacgtggaaccggacggacagtctgaaggaaatgacagccaaggagtatgaagcctgctgtacggctctggagaagctgagcggacaagacgaatggcgacagaagctgcgtgaggagctgcggcggaaacggagtctctgtctgaacctgatgcagaagctgggcatagatacatccgactgggcacgaatcaatgacttctgcagtaatccccgaatagtcggcaaagcgttcagacagattacggtggacgaactggatgaactggcggtaaagcttcggtccatacaacggaaaggcggcttgaagcccaggaaagaaaagcaaacgattaaccccgtgagcatggtatcactcattcagattgaccctgatgctccggcaaactgataggatatggaaaatagaaacacaaagattttagagaatctgaaaaaggaaatcaacctgcttgcctctgatatggagaagcaagatgcagccgagttttatagtgaattggctgactgggcatacgccaacggagaggctatgctgatggaagacgaacctgaaatgcaggattatgaaaaccaataaccccaaaaaacaagaatcatggaagaaatgaaacaaacgaccgtggtaatgacggcagaggaaaaggcggaatttgaagccttccagagagaaaaagcaaagaaagcggcagaggaaaaagccaagaatgaccgcgaaatgtacaaacagatggtggatgaggagatagcaaactccattccggtactgctgggcatcagtgagcagatcaaggcaagcaagcagactgtgatggacaacttcaaaaccattctggaaatgaaggcagaccttttcaagaccaaggtgaaggatgaccagcgcagccatacctttactaacagtgaaggcgacaaacgaatcacgctgggtgtgtatgtgaccgacggttaccgtgacacggtggaagacggtatagccattgtgaaggaatacatcgaaggtctggccaaagatgaaaagaccaaggcactggtgagcatggtgcttcgtctgttggcccgtgatgccaagggaacgctgaaggcttcacgcatcgtgcagcttcgcaaagtggccatggaaaccggagatgaccgtttcattgaaggtgtgcgtatcattgaggaagcctaccagccggaagtgagcaaacagtttatccgtgctgaaatcaaaaacgaaaacggaatgtggaaacctatccctctgggaatgacagaatcataaataatagaactatgatacaagaagtggagaaatctccgaaagtagccctgtgccgtgcttgctacggtacaggtaaagtaaagaaagttgtagaatatccctctcggatctttggaaagaagcgaagcgaaaccgttgaggaagtctgcagacagtgtgaaggaagtggccgggtaacggtaagcgcaaaaatgacgcttgacatccgtccctataaacctaaagtagaaccgtctatgaacgattaaacctatatgggaaagcggcacggagtcagttatcagaagcgtgtagtagaagtaaacaggatatatgaccattatgccagtcacggtgtaccgaaccgtgaaatatggcggcggtacatatatcctgtgtatgctattagtgagcgtacattctacaatatgcttaaagcgtccgcagaccctaaaaatgatttgccggacgatacggtacaattgaaatttaactttgactgggaatgaatgaaaacgtaaaaaaagtagtggcccggatactgaaagacattcaggtggaaatgagtgatgagtttgacaagaactttgaacggcaggcttttttcagtgagaaatggcagcgacggaaaagccccatccggaatgaaggtagagccatactaacagataccggggcgcttcggaaaagtatcggaagtcggacaacggaaaacagcattaccttctttacctctctgccctatgcggccattcataatgatggcggtgaaatagtggtgaccaagcggatgaagcgtttcttctggcataagtattatgaggcaaccggagcgttcggtagaagaaaagacggcaaacttcgaaaagacaaacgaaatgtccggcttgatacagaagccgatttttggatgttcatggctttaaagaaagcaggaagcaccatcaggattccccgacgccgtttcctcggcacatcgcctgaagtggaaaaagccgtccgtgagattgtagaagagaacctaacagagtattttaccattgaatataatatcataagaaaatgagaaaagaactttaccggatgctttgccgggagctgaaggccattgaccttatcaagcacatagacttgtggaaccataatgtggaattcatcgaacaggaagaaaactgggagcgtccggctgtctttgtggaattctgccctatacagtggaatgcgattgttcccggtgtggaataccgggcagaacctttgattaaactgcacatcgtgacggactgggaaggttcgagtgctgagggcagcgagctgcaggaggatgcgctgaaggtgtttgacctgtccggactgcttcatgcacagcttgccggattgagcggggagacctttttggagctggatctggtggagagtgataccaatcacaaccatgaggatattgtggaaagtatcgaggtatatcagtgtgtggccatcaagcggctgcaatagccgtctttattagacagaaaaagccgcggacgtacaaattaccgtctgcggcttttttgttcaatacaggcaaagtaaacgcaatcaggcagcctctttcttgtaaagcatcatatctgtgtaagaagagttgtaattcatgtgagcattgaattccacctttgtgcagttttcaaaaggattacctaaatccctatttttacctatccattcgcacagctccagaattgaagatttgttggatgtgaaatatacgtatgaatgccccttcagtacattcagcacatccagatagtctgccatattccagtacatgttataggtccctacgtcagtggacagatagggcggatcaacaagaaatactactccaggaatatctttataccggttgaatacttccttgtaatcgcaagatacgatttccagcccttcgagatagtccgtacattccgggtagccggtcttgcgtatattgttgtataaagcttccttccgcatatcctgaacagacagtttgtatttcatggaaaacaagatagaggaggagagggtaatgaaatccacatatccggtgctattctcttcctgctcgatgcggctgaatattcgttcacgcagttctcctttaatgattttatgacgtggtacggaattccctaccatttcgcgaatgtcagcaagcagctgattcgtttgcggaatgtgcttcatgcggaagcggtagttatcaaagtcattatagataacagtagagtggggcttgagggatttggtaatgtgagacaacaatccggagccaccgaacaggtcaacaaacaatgttccatccggatattgctccagcactttcatgaattccttggctaacatacgcttttgcccgacaaatgggagaggggctgacagatacatctttctcatacgttcaattcaaattttacattttcattgccggcaagcagctgttctgttttgtcgatgttgttttcgtaaatatgcacattccccagattcagggtgatggattttagtggcaactcaatctgtcttgatattagatacaaatgataaatatctgccggcagtcctaaattcgcatcgctgcttcgctgataggcggtcatgaccagttctccttgctctatctggaactgaacaagactaaggcatggagcctggttgctttctgttcctgtagatccgagaaacaatatatagtttttgctgttccttttttccctgtttatgcgttcgatgagtggcggcagtttttcaaaataggttgggtagctgttcacaaggatagagccgcagtagtcccaccagttgattccggcctccctgtatttttccacgtttcgttcgcccctcataaacagttgtaactcgttttttaacttcttccgcgctatggtatgcccctcgaatatatcaagaaggtcggcagggagcagcgtcagctgttcattcagtaggtagcggatattcccttttttattgctttgcatctttccggacgaaagcaccttgcctaagatttgataatacttgtccatgatatgaatgttatttattgcgatacaaaggtagggtaggggagtttgcctttagtgggaggaagtcctgattacactgcacacaaattgcagtcggttttaaaacgcttgatcaggtcatacacctttcgctcactgatgccatatcgtagggaaagcgtagctacgatataagacactttttcaccattggtctgcaacttgttatattcattatatagttctatatattgcacgtcatcgggtcgtatgcccatgtaatggcacgtttttaaaagctctctgttcaattttagtatctcaattactttcatatccagttaaatttcgtacatttgcattgtctcacttatcattgcgcagaatagcgcttacataaaaaagcctcttactggcgaacgagggtatctgcccccggtcgtgccggtaagaggtgctttatgtttaaatggtaagtgagacgactatttaacaggccgggggcttttttttatccttcccccgaagggattgtcaatcattcaatccgatataaatccaagttgaatacatctttccttttccatccttcagccagtgtgttttggatgtgtctgaccgcttgaatgtagaagtccttcagattatccaacttttcaaaggtatggtattcgggctgttcatccgaaccgaatttgaatgtaaccggaagggtctctccgcccgtctgaacggccaaatcgtatgctgccttatagttgtattggttctccgtagaaagccatacaggggcgccattataggcgaatccggataggatagctgcatcagtctggctgttataccatgacataaccaatgtgcggatttcctcatcagtaggcttgtgtccgaactcctcttccatgtaggaggcagagccgttctctttttcctgcacatcccagcggatgcgccatttgtctttaaccgggttcgtgcattccatcagcgatacaccggcacttccttcaactcttctcatgtaaacacgtatttggttctacctttgccgaatgtctctgtcttgatggtcgtttcaaacgggaaaccatccggcatttcctttacttgtgcgagaatattcttcatttcctcgctgttggtgaagaacttctttgcttcgccgttcacttcgatggccacaatacagcggtcttctccctgctcggtcttgataccggtctcaaagtccttcactacaatcggtaagtttaccagttcccggatgcttaccaccacaccgggaaatcgcttcttgccgtcctccggcttgtaagcgacattcaagtctttaaaacttctcatttctttgcctgttaattttttaaacaacttattacagtcggcgtgcttcgtcatgccgtagaaactggcaatcagttctcgccgtctttttctcgattttacctcgtgcatcttccgggcaaacttctgcttgatacgtttccgcaatcttacatagtcgggacggataacatagccaaggaaatcaatgccttcttctacagggaatacccgttcattcggctttatttccaagtctatttttcccatttgcctgtgaataacatcacgaatcttccacaattccgctttcgttttaccgagtaccagtccgtcatcgcaatagcgatagtaataacgaaccccgtacttatccttcagatagtggtctaaaaatacagacagaagcagatttcctgccccttgtgaactgcgcagtccgaagcttataccttccggcagcagcttaacaaaccgctccagtagcaccaacagcctttcgtccttgaacaccctccggaagcaccacataacaaagtcctgccgcgcattgtcgtaaaacctacggatgtcaaacttgtatgcgtaaagtgtgccttccgggtctttttgcaaatcggtacgtatgcagttcatcagatcatgagtaccgcgccttttgatgcttgcaccggttgtccggatataacgtttttgcaggtggcggtccaccacattcatgatggcaaacacagcgatgcggtctttcatggacaggatctgcaaaatacgttttttaccgtattcttcaatttccctctcatggtagccgcccagccggaatgaaccgtccgcaatggaagccgtcagttcggcgataatcttctccctatgggcaagcaggaatcgtccctgccttgacctcttacgaccggttccgcgaagtaccgaatcgaatgcctccgacatattggagtattcgatgatttcctcgataatatatccttccctgcgcataagctattggttaataaacatgaaagataagggccttcctttccccggatctgacttcttcgaactgataacagcctaccaaactccacccgacgcgtgatttttcagctttccaccctaatgggtgctgttgctgtggcttgcttccctcggcaccgcttcggggacacgtccccggtgctgtacgccgattaattagatttccagacgcgagccgatattcgcattcgtattcgaagcatcgttattcgcattcgcattcgacacaccgccattcgcgttcgcattgttgtacccgcgatagaccacacggactatcgggaagctccaccgggtacaaagttactgatttaacaggcaaaatgagctaaagcattacactatccaccaaaatagggccgacaatatgccgcctatgacggtaagagaccagtctatccagtcccaaagtccgcctttcagtttgtctttcagttccagacaggaggctgcgacagctgcagcatagagcgctgtccacggggtgaaggccaaaatgcctaccaacaaaccgccaataaggtgtttgtagcggttgctttgtttgagaaattcgataattttgttcataacgggttgtttttaaaaattgttttgtatatttgcagtgaggaatagcgttagatgttcagaacgggattgtagttcccggagcttgcgtctttcgctattctttcttttttatatgtttgtataattcacctccttctgaaagactgtgcagcgtgtattcgtgccagtcgtattcccgaactattatcagtgctttttcacctcttacttctatctcgaaaatgtgcgattgtatgaggtgtggaatacctttgtggttatctgctgttcccaggtatttggctttggcaaatacattctttatatccagaagcatgaggttcttttcatggtagaacttgtatggctggttggtccattcttgaagcgtgcgttttgatatgtttaccgggaatgggaattcattattcgtgataactgttccctgcaatggcttggcttgcttctttatctgtttggcatctgcattggccaatgttcttaccagtttgcatgcggcgcacaattcattttccggaacgaagaccagtttcatatttccgttgttcatatcgcaatccttacagcgcttgatggtgtatggattatagtcgggcatcgtcttttgttccatgcctgcattgaaccggaacattccctttttgtcaacttccaaagctgatttcccccttgccatggcctcttcgtggtctgtaggcggatacttggatttgcgtacctggaccacggaacagcggcagccccatccgttaggaggatagaattctgcccagaacgggtctgaagccgggagtgtgatgccggccatttctgcatgggtgggacgtacctttgcatccccggccgtgcggtactgtagataatagcggtcgccgtcctgcatgaaccgttcccatttggctgccatttcagccgaagcctgtacaaaggtgaattcagcccgtagatagtttgaattgtatgtttcgtcgatcttccggacatcattcaaaaagcgttcgaacgtctttctattgccgttttcatccaacagggagggaaaggcttcattcagttcatggaaggtcttcaagccggagaatacatagttggaacgctccagccgcttgcgcatggtctcggacatttccacctttcggaatgaaccgttcaagacagaagaatgagcttctataaaatcctgcgcttcttcggatgccaggatacctatttcaaggtttgccccttcttgccggaacagcaccttcatcatgcggtcaaagcgttccgtgagcttgtcgcgcatgagttttgcctcgtcctccatggagaggcatagtttctgtttgcccaacaggtgggcataccgctggtgcagccccgaataatcatcggggctcagtcgaaaaaacgggacagcgtttcagccggtttgccgtctttcttttttttcggttctgtcgggtccggctcttctttcggttccttctcctcgcacgggataccgtatttttcctcaaagtactgaggctttaccttgtagtgttgcagtaccatttcctcgtaagctttctgctgttcgggcgtgtagtcaatggagtagtcccaatcgaagcgcagccctttaacagggaacccgtggcgcaccatgcgcggaatgagctggttgttcactatatcccgaagcatatcacagtcgctttccacgaggttctggaacacttcaaggtgcgtttccgactgtgataggctgcttccgtcctcgatggtcatcgtctgcccgatgataagctttgacagttcggagttggcccgatcgatacgcttgtcatagacattgaatgcgtcccccttgccgctttccacaaattcgatttcggtttccattcctgccaccatggagagggcggttccggcttcacgcaacatcttgtcgagacggtcaatctctttctgatcgcgcgaagtggtgcgtgctatacgcatgggcattccgaatatttccccgaaggtgtcccaaaaggccagcatgttctttttgggaatagtctgtgaagcagccttgagatacagcccgaggtcgtcgggcctacctgcctcaatgagccagtcggaaaaaggaggctggcggtagtctatacctgtagtccagtcctgcccgaggtcggtaatgacacgcccatactcaggaatgacatgtttgcgcggaataagcttcacatccgaataacagatgcagccgtcgccgtcagtgcaaaggtcgcccaattcgatgagcgaatgtccccagtagattgaatcaagtgcatagcgcatgagctgcttgaaccaggactggtcaaagaagtgaaccgcttcctcgttctcatcccctttcatatccacgattttgaaagaacgtgccatgacaaaacctctgcgctgctccacacacccggagaggtgaaggtctatttccgcgtcccggtagatgtcgtacaggcgctggcggctgggactgtccacattgatggcatactgccaggcatcgcgccagttcttgatgtccttccgggtgagtgcatcggtggtgcgttgcaggtcgatgaccattttctgcacccgcttgatgtctttccccttggccagattaaaattgccgtatggcgtttgcagtacgtttttcggtttattggaaaacataccgctgaaaaagtctttaatatccataatcctaccagttatgatgaagctgcttctgacagctgtaaacaaatgaatttccggacggaagcccatcttctccgacagccaaaggcaaatcagggacaatttttccggcctgtacgccttcaagccacttgatggcccgttcataccgttccttgcgtatctcgcttcccatcttttgcggcatggctgcactcatgtggtaaagtgaaatgtcgcaggtgtacatgacaatgaggcggttccgatgttcatcctgtgcagagaaaatggccgtacagtcgtatttcggccgtagataaccggcaatttcttcccgggcttccgcttctgcattggtacggttttccgggcttacctgcgagataacctttaatgcgttgtcgccgatgacaactttgtaatcttcttctgtaatgaacatgactttactttcatttagtgatgaacaatgccattttttctatatcccggatagtggttcccttgcggaaacggtggcggtgaatcagttcacagatgttccttttggggacaactttcagtttgccacccatatacaggacgtagtactttcttccgtagagcttggcgtacttgcaagcacgggcaacggcacgtttatagcgccatgcaaaaatcattcttttaatcagctgtatcatgttaccatatatttttggcggtcggccttttaccgaacaccggttgaaaactctcctgccttgaattgcgctgcagcatccagatggctccctcgtcggcatccggtgcatcatcgtgaatacggctgccacgctccagtgccaaggtctgttcgattccggtctgcatatccggcgattctttcaacttctcattgtagaatacgaaaccgcgttcccataatggtgacaccgcttcgatgcgctggagcttgtccggtttctttcgtttgtccggcatgatgggcagttggtatccacgcagattcccttctgcctcaaactcatccagaatgacatcctgcatgaagttcgcttccataaagaactggacggctgccgtatcacgtgtacgctcgtagaggtcgtaaagccaccgtaccattcctgaaacggtatcctgccggacgtaacagtctataaggtgcagttccttcccaatcttgccccaaaggcggcaagccttgtagtcgttggaagtggtcgatttgaaagaggggtcggtatagcagaccagcatttcatacttggatagcctgggcagtttcttgtaacgaatccagtctgcccgaaaaatagttccgtccacgatggggttgtgcatcatctccttttcccatgcccggtagcctacgaaatccctgtattcctgcgcctcttctttcgtccatttttcgcgccataccggttctccgttcttgtctattgccttgatgacggatacatgtaccccttttgtcttggtgagattggccagcaccgagtttttagaaatgaggttcccgaccatgataaaacgcccccggcccacatccagtgcaccaaaaagggcttctttcacccagtctgtaatgtcatgcacccgtttctcattgcggcacagttcgtcgtcatccaagtcatcgatgacgatgtagtccggacgtgcttcccggtctcgcaaaccacgtggagactgtccgcgtccgcaagccaggaatttcaccccgttggccgccttgaactccccatcctgccaggaggcattcccctgctgcttgccgaagtcggcaatgatgcgctggttatgttccagttctgcctgaatatctcccagcagacgtgtggctgagtcctcacttttgccgaccaccaccatgaagttgatgagacgtttgggctggaacatcagccacagcggaacaaaaatgtccatgtgtgtggacttggcatggccacgcggccacatgaataccgctttcaggttgggtgtgccttttactttagccgctgccgcattgtggaacggtgcattgtggatggtgcgtatgacttccccggtggttttgtcacgcaaggtgagaaagtgggggaagtaatattcacagaacgcggcatagttaccctgcagacgcagaatacgcctgtccttttgtgccggtgtctcgcccgcgagcaaagccgtatccgtgatggactgcactcttttacagtgttccttccactgttcgtatgcctgtttcttttccgctgctgttgccatagccgttttattttatgcccatctgttcggtgatatacagatcctggtacttgttgattgccctgaccagttccggagtcacttccgggtcgatggttgaacggtattcaatccatttggagaatgccatgaacacttcaatgacatccactacgttggccttcttgtctaacttttcaatcaccgccgaaagtttggccagtttgtccccgagaccagctacaagtgcagggtcgttcgattcgttgacttgagtaatgagtgtatcaatggtgagcaggagtttgttcaccagttccggccgggtgacgttctttgccgcccttgcctctttccatccgtcagccgtgcaccattttgagatggtgacgcgtgacacgtccactttctccgcaatttcagtctgttccatgccggaaaggaacagtgagcgtgcaagagattttttcttttcgatttctgcctttgtcatataataaagaatatagggttaaaggcaggcttcggagtcccttgcacctgcccgatttattcgcaaagttgtccgcttatcagcttgcagccaaaataatgtgcaacggtttcatagaagtgtgcaaccattgcacacttttttggcttcccggtaagtgctctgtaatattgcagcgccaatgcataaaggcgtggcatgagaaaatgagtaaacgtgtaagaatttcaaacgacagcctgaacagctacggaagccgtgtgttgacatcgggcatgagtgtggagcagtattgccgaaacccggtactgctgtacatgcaccaacgcggaaacgtgattggttatgtgaaggaccttcgggtagaggatggtgaagtaaccggggaactggtgtttgacgaagcgaccgacctcagtaaaagatgcaagaaacagtttgaattcggcagtctgagaatggtgagtgccggaatagacattctggaactgagtgaccagcccgaacatttgctgcaggggcagaccagcccgacaataaccaaaagcaagctgtatgaggtatcactggtggatgtaggttccaatgatgatgccatcgtactgatgaaggatggaaaacaaatcacattgggaaaggatggtgattgtcctttgccactaatcaataaccaaaaaacaacagaagaaatggaactgaaacttttggcccttcaattggggctgccggaaacggcaacggaggctgatgttaatcaagccttaaatgaactgaaagcagccaaggcagagaatgattccctgaagcaagaaaacgggaagctgactttggcccgtatcactggtcttgtagaaaaggcagtggtggaaaagcgtctgggagaagacaagaagatacagtttatcgaacttggcaagaaggttggtgtcgatgaactgaagaatgtgcttgatgccatgcaaccacaggtgaagatttccactgtattgagctatcagggcggcaagcagcaggcacagccgtccacctatgccaaactgagcgatgtcccgagtgatgcgctgcttgaaatgcgcgagcataacccggaggagtacaagcgcctgtacaaggctgaatacggcatgacctgtgaaatttgaaaacctttaaaatgaagaaaatgggaaaaattgtaatgcttttgacggcacttctgttcaatacgctgacaggtgtcgtgtgtgcttcggtattgggattctctccggtggccggagctgtgggaatgaatgcggtggcagcctttatgggaatggccccgcaaagtacttcaatactccgtgaaggggtttatacggaaatctggacaggggaacttgttaaggtgctccgtgccggactggaaggaacctggctgtcaggaatccccgaccaaagcagtatcgtgaataacgatgtgattcacctggtagaagttggtgtagatccggatgtcttgataaacaataaaacctatccgattgatgtgcaggctttggaagacaaggatattgccatcaagctggacaaattccagaccaaggctacgccgattacagacgatgagctttatgccatcagctatgacaagaccgcccgtgtgaaagagggacatgccaacagtatcaatgatgcgaagtttaccaaggcggcccatgcgctttgtgcgaacaaaaatacggaaactactccggtgcttaagactaccggcgagaaagatccggctacaaaccgtctgcgccttaccgtgaatgaccttgtggaaatgaagcgtgcccttgacaacctgcgcgtaccgtcagacggccgcagactggtgctttgccccgaccatgtgaatgacctgctgctgaccagccaggcattccgtgaacagtacaatattgaccgcaacagcggcaaggtaggtaacctttacggctttgaaatctacgagtatggcaacaacccgctttatactacagccggagtgaagaaggcattgggtacaacggcagaagccggtgaatttccgtgttcatttgccttctacaaacagagggttttcaaggcaacaggttctaccaagatgtattattccgagtcaaagaatgacccgttgaaccagcgtaacctgattaacttccgccattacttcatctgcatgcccaagaaagaggatgccggagtggtaatgatgagcggctatcaagcatgatgattatggcaaagttgaaatatctggtaatacactgtacggcaaccccggaggggcgtgaggtatcatcggcggacatccgcaaatggcatacttctccggttgcccagggaggaagaggatggaagcaggttggctataccgacctgttccacctgaacggaggcgtggaacgtctggtagaaaacaatgaggatgcacaggtggacccttgggaagtgaccaacggagccaaaggatataacagtgtaagccgtcacatcgtgtatgccggaggcgtggaaaaagacggtaagaccccgaaagacacccgcactggctgccagaaaaaggcactggagaagtatgtgaaggattttcatcggaaattccctgatgtacgcattataggacacaacgaactggcagcgaaagcctgtccgagcttcgatgtgcaggaatggttgaaagaaataggtattaatcaataataaaaccgggtggtatggacttgagcgaatttatgaacattatccttggcggcggcctggttggtacggtggcgaccattggctccttgcgggctactgtgagaaaagcgaaagcggaagcgatgaaggccgaggccggtgcagaggccatgcgcatagataacgccgaacatgccacccgcattttgatggaaaatattgtaaaacctctaaaagatgaattttgtgaaacaaagaaagaactggcccgcaatacgcgcgagatggcccgtcttagaaaagctattgatacagccggaaactgtcctcatcgtgacgattgccctgtgcttgacaggttgcgcgagtcaccgaaagagcatgaaccgggaagtccggacggaatcggcaagcgccgacagcgcgagcggaagccgacgggcgggactggtgatggcgggtataccggcgagttcggtgaagctgtctatacctgcggacagcctccgtaaacttcctgaaggtgccgtgtaccgtggcaagagcggacaggcgaatctgaccgtaggcagcgacgacagcgggaacatcgtggccgaagcctcgtgtgacagtctgcagcagctggtgctatggtatgaagaagagctggcgcgtatccgtagcgaaaccaagagcgaaatttcaaatgacgttcaaacggtagaaaaacgccctccgaaccggatgcggacgtttatcacaggtgtattggccggcttgcttgtcggtatgttattaacaatgaaactgaaaaaaagatgaacaagaatttcatgtacggcataggagccgtaaagtataaggatttcacaatcgggtatattgaaaagaactcgtttgacctgggcggcaagaaacccgaggccgcgaagatcgaggccgaacaggtgcagggtgccccggtgctggtcatcccacagagtaacggcggcatcgccccgacgttcaatgtgatccagatgaactattcgaacctgcacaaactgcttggcggcagcctgcattataagaaagaagatttggaaaagaaaactccgatcggttggacagccccgtcggaggtgcttgtcatgcagggaccatgggaactctccctcgtgtccggacagagcgtactgattcccaacgccacgctactttccaatcctgcaggcaagctgacccttacagaaacctccaagatagaggttacgctcgaagtggcgatgccggaggacggttcgcagccttacggcgtgttcgatacggaagcaataccggacgagtgggggcagtacaagctgccgccggcggaagccgcggctgcagcatcgctccaaagtgaggagggctaacgtatggctgaccggctggaacaactgatagagatggagtgtgcggatgcgctgctggacagcggcgtgtccgttcctcttaaaaggtggaagcttccgtggctgaaacgcccggtggaggtgcgtgtgacgatgaagcgtccgaggctgtggggtcagattctgctggcgagggaatacctgaagatgggcgttgcgcccgggtggcaagcaaaggacaaggtcgaggaactggcctttgtagcggaacatggtaaggctgtgagccgtctgctggcctatacggtatgccggggatacgtgtcgcggcacgtgggcatcggggtgacagcgtgggtactgcggaactttgtggagtggcgttatctgacggccatgttccaaacattcgagcgtctgatgggcacgaaggattttatgcgtattatcagctcgacagcgcgggcgaacccgatgactccgagactgagccaggcaaggaaggggagttaagaacccggtatgagggttcccatagccctttcggcttcgtgtggcagattgcatcggcgaccggctggagcgtggattacatccttgatggggtgaattaccagacgctgatcatgatgctgagcgacgcgccgcggtatgtgcggaaaaagcaaggcggcggaaatggtgctcccagaccggaacacagcgccgaggatgaagcgaacgatatagtaggattttttcaaagcaaactggaatgagcaaacctgtagaagttgaatttttgatgaaggacaaactcacgcccggcatgaacaaggccgagcgtgaggcgctggaactgcgtaataccgtcaggctgctggaggctgaactggaaaggctgcgccttgccggggagacggctgcccccaatctggaccagagtgccaatatcgcgcagatccatgcactggagaagcagcttgaggaattgcgcggcaaactgaaactgctgcaggaggaatcggaatccgtgcaggtcacccctgcagatgtacccaacgcgcagcgccagttgggcgggcttcacaacagtatccagcagatcgcccgtgaaatgccttctttggccatgggaccgcagatgttcttcctggcaatcagcaacaacctgccgatttttacggacgaactggcccgtgcccgcaaggaatacgatgagctgcagaagtccggcaagaagggcacaccggtatggaagcaggtcctgtcctcacttttttcctggcagacggccatgaccaccggcatcatgctgctggtaatgtacggtgatgaaatctgggattggacgaaaaacctgttcagtgccaaaaaaggcgtggatgaattcaacatatcactcaaggaaatgaccgagatagagaaggacggccgtgcccagatggtgcgtacccgcttcgaactgaaatcggtcatcgatgaaataaagaacttcaccggcagcaaggaacaggaaaaggcgaaggtggaggaactgaaccgcaagtacggggaatctttcgggtattataaaacactttccgaatggtatgatacccttatccaaaagagcgaggactatgtacaggttctgctgcaccagaccaatgtccagaaccttgtaaaaaaagctgcagaagccgatgaagaggtgaataaaatcaaggcgcagaaaccggaagaggcggaaagcgccatgggttttttcgggaaatggggacaatatatcatgcagtcaagcatggcagaatccgggcagttctatgacgcacaggctgccatcaagaaacatgatcaggaagcttatgacgtactgttgaaaaatgccgaaaacaaacgtgacggttatctgaaaaaagcggaggaagaggtaaagaaagccgcagaagcagccaaaaaaggaaatatcggtgggcatatcgaccccaagcagtccgggaagaatccggaagcggaagccaagcaacggcttgccacagagcgtaggctggcgcaggatcttgccgccctgcaggctgaaaaccggaaggaagagatagaccgcatgcaagccggtaccgagaagaaactggcacaaatcgaatatgactataacgcccggaaagaagagataaaccggcaggaagccgactggaagcgtgagaacaaggaagccggtctttctaccggagataacggacttacccgggagcaacaggatgaacttgaaaaagcccgtgcctcaaacaccgagtcaaggaaaaaagcggaggcggacgtgtacagggaagaggcggaagccatgcgtgactatctgaaggaatacgggaccttccagcagcagaaactggccatcgctgaagaatatgccgagaaaatccgcaaggcacagtcccagggcgaaagactgactttggaaaagcagcgtgatgcggctgtgcacaaagtggacatggaatcccttacccagaagatagactggggagcagcgttcggggatttaaccggcttgcttgcagaccagatgaagaatctgcttggcgaacttaagcagtatgtcaagacggatgagttcaaaaaatcaggagcagcggatcagcaggtcgtttacgatgccattgaacgtattcaaagcatgctccccggtggcaacggcacattggattttgcccggctgcaaacgcagatgcacgctttgggggatgccgtaacacgtgtgcaaaatgcagaactgcagcaggaagcggcattcatccggttgaaagcggcgcaggccgattacaacaaggctcttgaaagcggtaaccaggcagaaatagaacgtacccaaattgctcttcaaacggctcaatcgtccagcgtttcagctgacgaagaatacctgaacgccacctctgaaatgaaggcgcttgccggggaggtgaaaagtgcctcccgggacacggttgacggattgaacatggtatccaacgggttgcacggctttgcgagcggaaccttgcagggatcatttgaaggaatccagaacatgcttaccggtctttcaaaactgaatatcggaggcaaggtcggcgatgccatcagccggatgtccgaaaccctgtcaagtgccggagtcatcgggcagatcatatcggccattctctccatactggatttgctgaaagacggtattggcccgattatctcatcattgatagacaccattttcaatgcgataaccggaatactcgacaatatcctcagcggagacctgttcaaacagataggcggttcccttgtgaaaggtatcgggggattgctgaacacggtgtctttcggaggtttcaacaaactgttcggcatcggcgggaacgccaaggaagtgcaggcggctatagaccgtcttacagaccggaacgagctgctgcagacctcgatagaggatctgaccgacaccatcaagcagagccaggggacgaagagtgtggcggcttaccgcgacgcgtacaagatgcagcaggaaacgaattcgaactacctgcagatggctatggcgcaagccggctaccacggaagtcaccacagctggaactactactggggcggtttcaaccaggcacagatagacaaactgagcggacagatcggccgccagtgggacgggaacctgtggagcctgagcccggaggaaatgaaggcactgcgcagcaacgtggatatgtggacgcaaatccagaataccggtaagggaggctatggcgggcgactgaccgagaaactggatgactacatagaccaggccggcaagctggaggaactgaccgaccagctgtatgaagggctgacgggcatttcgttcgacggtatgtacagcagcttcatcgacaacctgatgaacatgaagtacggtgccaaggatgcggcggaggatatatccgagtacttcatgcgggcgatgctgagcaacaagatcggtgagatgtacagcgacaaactgaaaggctggtgggagaagtttggcaaggccatggaggacaacgaactgaccgaggcggaacggaacgcgctgatggaagagtacatgcagtatatggatgaagcccttgccctgcgtgacaacctggcggcagccaccggttatgacaagacgcagcagggcggtacgagccaaagtgcgaaagcgggcggctttacggccatgacgcaggaccagggcacgaaactggagggcatgttcaccggcgggctgcagcactggagcagcatggacgaccggctggaaagcgtggtggagaagatggacacggctgaagggcatctggcccggatagccgagaacaccggtgtgagcgccggacacctgggcgaactgaaggaagtgataaagaaaatgatacgtgacggactaaaagtgaagtgatatgggcaatatactgagcggactggtgctggtgaacggcacggacatctggacggaatacggcgtgttcctggtggaagaccggcgcgggggcatggagaacctgacggccatcctgaccccgagcaaggccaagaaggatacggctgtggacatacgggaagagcacggggaaaaatacagccccgtgctgaccccacggaatgaagcgcgtgacgtgacgctgcattttgcgctttacaacaagacccaggcaggctggatgaagcagtactttgcctttgtgaatttcctgaagcaagggaaggacggctggctggagatccgtttcccccagctggatctgcagctgcgggtgaagtatgccgactgtacgaagttcaccccgctgacctatctgtggacggaaggtgtgcatgccggaaagttccgggtaaagttccgggaaccgaaaccgattatataaccattcaaacgctattagaatatgcttctaacgatatatgataaagccggaaccaagcgtgcggatgtggccgtgaacgacagctcgacgcaaagcaaggaagtgcagggagacaatgtgctttccctgtcgttcagctattatgccttcctgcccctggacgtgaacgactacacggactatctgggcgaacggtactggctgacagaacgctacacgccgaagcaggtgagcgatggtgaatgggagtataacctgaagctgtacggtatcgagagcctaatcaagcggttcctggtgctggagacgacggacggggacaccaaccccctgtttaccctgacggccacgccccgcgagcatgtggcgatggtggtgaaggctatcaataacggcatgggccacattactgactggaagacgggtacggtggaaggtacggagctgatcacgatagactacgaggggatgtactgcgacgaagcgctgaaagccatcgcggaaaaggcaggcggcaaggtggaatggtgggttgaggggcagactgtgaacgtgtgccgctgcgaacacggggaagaaatcacccttggctatggcaaggggctgacctccctggaaagagatacgagcaacacggccaaattctatacgcgcctgttcccggtaggctcgacccgcaacatcgatgcggagaaatacggcagcccgcgtctgatgcttcccggcggcaggaagtacatcgagcagggcgtggaggaatatggcatctatgaccattacgagcaggatgctttcagcggcatcttcccccgtcgggtcggtacggtgagctcggttcgcagcgaggaggtggcagacgatgaaggaaacaaattcaccgtctattatttccgggacggggaactggactttgaccctaacctgtacgagctggccggagaaaccaaacgtgtgtcgttccagacgggcgaccttgccggactgggagaaagcgatgaccactactttgaggtgaactacgacagcgcggcacgtgaattcgaactgatcaccatctggccctacgatgacgacacccagctgccgggcggcaagctggtgccccgagcaggcgacacctatatcctgtggaatatccggatgccggatgagtattaccggctggccgaagaggagtttgcggttgcggtggacgagtacaaccgggaccactggctggacattgccgcctacaaagccccgacagacccggtatacatcgaggagcacggcatagacctgtttgtgggcagacgggtgaagctggagagccggaagtatttcccggaaaaaggctaccgtcagagccgtatcaccaagatcagccgcaaggtgaacgaacccgggcagatggacatcgagataagcgatgcgctgcaggtgggcaagttcgacaaggtgacggacagcatcggtgcgctgaaaagctatacgaaatcaaagacggaaggcgctgcccttccggacatcatacgaagctgggacaagacgctgcccacggacaacaacctgttttccgcccggcgcagccagaaagagttcctgagcaagaaccagccggacacagccaaagagtccatccgcttcctgaagggtgtgagctttggcgaggctgctggcggcaagccctgcggcatcgtggatggtgagggcaatgccgaatacttgactgccgtgatccgcgaactgctgcgcagcacggagtttgtggacgggctgaccggtgagggctggcagctgtggattgaccagctgaccggactgacaaacctgacggtggacaaagtgactgcccggcaaagcctggtggcgctggaactgctgatcgagaaggtgcgcagcgtgtgcggccagctggtggtgtccgctgccaacggcaagatcaaggacgtggtgaagcagggcgacaactaccgcatcgtgtttgagcaggaatcgggctttgtggcccatgacctgatgcgctgtgcggttacgggtggtaagaaactaaaagcatactgggtggaggtggcttcggtgatagccggcggtgtactggtcccggtaagcgagtttggcggggtgaagccggaggcaggcgatgagtgcgtgctgatgggcaacaccgaaaccccgctccggcagaaccttatatccattgcggccacggaggacggacagccccgtatcgacattctggacggtgtgaaggccaagaacttcaacggctgccttcgttgccggctgggtaagctggacggcatcaggagcagcgctttcccggcagacaaacagccgaaaggaaacggcctgtatgccgacaacgtgtggctgaagggtacgttcgtgttgatgacgggcgaggacatcctgacgcggtttgagataaccgaggggaaaatccattcagccgtggaaagcttgcgcaaggaaatacgcgaagaacagagttatctggacaacagcagttttgccgacggcatggacaaatggaagacgggcagcaaggctacgctgttcaccctgggcggacgctggatctgggcgaacggcggtccttacggtacgaagccggacggccatgccgagatacggaccgacggcaaggtgccttatgcctatatccggaacagctatatcatgcagaaactggaggacttccggctggtaccggagtaccggcagacgaacagccagggcgaacgggtgcccggcgtggtgtatctgtcgttcagctaccgggttatcaaggccggaaggttgaaaatagaatttgtgaacgctgataagaccgggtttgagaacttcaacatgttcggccatgaagaggacctgcccgttggcggtgagaagatgttcacgttggacggactttggaacggcactggcgacttcaagctgtcgtttacgggcgtgatttacatttcgctgctggtgttcagcaccaacaaggcggacgcactggcctataagtaccgtacactgttcgaacagagcgaccggctggtaaagatttcagcggcggtcttcgacaaggacggtaatgcgctgaaagagaccgggcttgtcataaagcctgaaggttccggtctgtatgcgcaggacaatacaggaaagattgcccttatcggggtgagcgtggaggaagaggacgagtacggaaataccgtgagcaaaatcaagctgacagccgaccatatacagctggagggactggtaacggccaacggcaactttaagatactggaagacggcagcattgaaacgaccaacggtaagtttaccggagagatagacagcagcaaagggaaaatcggcggctttgagatagggaacggccgtatcggttctgtggccgactctcacgggagcggtggcggtcttgccatttatgatgattttttccgtgtcggcggcagcaaaggatatgtgatgttcggtgatgatgtgataccgtcttctgcaggaggagcttttaccgctgtcggtcgtatcgtgaactcagcccccaatatatacgggaattacggcttcgaccaagcgaactatggattgtttatagatgttaccggcggtacgaagaactacggtatcagcagcaatgcggcattacttgccccggcgtttatcaatacgaaagccaagctgcttaccttcggaagtggaaactacacggtggatttctcacaacacaatatcattttgatgtattacaatgaacccaactacagtaaggtagaggttacgctgccgtcggaaagttctgtggcatacaagttcggcatgagttacttgcctaccgattttgcagccattgtcacgttcagggtcagacccggttcaaagaatatcatactaaaaggtatctataaccacaatgaagatttgcaaaactacgagatggcatccggggactccgtaacggtacttattacaaaagcggacggattccgttaccagatattgaatcattcatcctaaaaaacagatatatatgaaaaagttagatttcaggaatttcagcgttcccaccggaataacccgtcagacgagggaggttttcgatgcacgtgagcagatagccgatttgctgtatacgcgtgtcagtggcatcaaggcccatcggcttgcgttcaagattttcgagagtaccggcgagaccgagttcagcgatgaggaaaccgggatgatacacatggcggtggaacgctattgtcttcccaatgtgatagatgccctgaacgaaatcctgggcgggtcagaaaccgataaaaacgaatgagtatggcagaaatgacacaagaagaactggttcaggaagtgctggaccgtgtactccagagttctaccggcgtggaggacttggagaccgtcacctcgctgagcggtgtgaaatcactgcccggggagaaggacggcaagatggtgaacgtccccctggaactgatagggaagcctgcgagcgatgccgccgcccgtgccgaggctgccgccaagaaagcggaaggagccgtagccggactggaggaaaagacccaggccgccacggaagcggccaccaaggccaacgaagcggcagccaaggcagaaaacgccgctgccaaggtggaacagactacggcagcagccatcggcggggctaccgcacgcttttcctcatggatggaaacaggcaacgttttacctgacaagagtaccaaaccgggcggcagcgtagtgtatgtagcggatgccgggaagttcgcctaccacatggactccaccctgtacggggactgggatgtggcgggtgtgcctcctgccggcatattcatgaatgcggaccggacagccatcctgccggacaagctctacctgctgggtgatgccgtatataccggaacaggcggcagcctgagactgctggcctaccggcatgaggtgatgagcggggaagcttacgaggcgctgcaggacaaggatgcgaatacgctgtatctgatttatgaggaggattgacgatgataaccataggcggtaaggaaataacggctgcgtatgtggggaaacgtgccctgtcggcagtctatgccggggcaagactggtgtggtctgcgataagcagctgtttcggacttggatactggaaaggcgacgagccgtggaacggatcggacgcatggaacggtagcagtaaaactgataaatgaatgattattataaaaggacagtattatggcaaaaaggaaaataagcggaatcatcaacgcgactgaacatccgatgaatcttgaaacaccatggaatcagaaacagccggacggcacctatcatgcctatgcaggcgatgacatcgaagcgttcctgaagaaggaactgtcaaaccgtacccctaccgaggaactggtgagcggcgagacgaaacctcctacatccggaacggtgttcgatgcgatggtgggtacggtgacggacgtggatgtgcaggacagcgaggacggcacccagtacgtgatgaccgtcaagcagaaggacaaccagggcggcgagagctcgaaggaagtgcgcttttccaagtacacggacgatgacaaggtggtggtgaacatcgacctgacggacagcggcggtgcgggacttcccgcctcgcagtatctggcactgggcagcggctttgtggtgaaatactccgtaggtgtgggcactgccggtggcggtacggtggacggctacagcgacctgaaagcccgcgtgatcgtgaaacgcggttcgaccgtcatcagtgagttccgggatgcggagtttgtgggcgttacagccggacagagctatacctttgacgcttcgccctacctgaaggatgccactgcctataccgtacaggtggaagcgcaggcaacttaccaggacggcacgctgatgaagacggccacggccaaggtgaccatggtggccatggagctggagaccacctactcggcgggcaacgggctggccgacgggggatataaaaatgacgtgaacatcccctttactgccaagggcacgagcggtgagaagaacatctactaccgcgtgaacggcggacaggcctttaccctcggtctttcggccggcagcggtgtgcagcagaagaacgtgaccatccccctgacacagatgcaggagggtacgaacgtggtggaagcctacgcgcagcatgagaactccggtgtggtgagccgggtgcattacattacgctgctgaaggcaggcggaggtgtgacagcgtatgccggcctgatgttcagccaccgggcagcggggttccagcgtgactggaaacacccggtgctggaggcagagcagttcacggcatggaacttcacgtatgccggctatgaccgcgatgcgtatacggcccgtgtgaaagtgaccgaccggggcagcgtggtgaaggaagacctgctgcaacgcggtgagaccggcagctacggacggacgaacgtgaacgtggaaccgttggactaccgtgtgtcatgcggcgatgccgtgcttgaggtgcaggtgaacaccacatcgcacccggacattgaagccacgctggcaccggatgccgtgtgtacgtttgacgccttcgggcgaagcaacacggaaaacaacccggcaagctgggtgagcggtgacaagcgtatggagttccgggacgtgctgtggagcgtgaacgaatatggtgccggtagcggctggcacaaggaccgcctgctgctggccggtggtgcaggtatgaccctgaccgctgacggcggttaccgccccttcaacgaggcggacaagcccgagggatttgccatccgtgacgtgggcatgacgctggagatagaatacagcacggccaacgtgacggatacggatgccgagctgatcacctgcctggggcagctggacaacggcaaccggtacgggctgattgtgactccggaagaggccaagttcctgaccggtgtggtgaccgaggcgatggatgccggacaggtgctgcgctatgaagactcggtgggtaccaagttccagccgggtacgaatatccgcattacctacgtgttctatccgaacgtgcagaccaacgaacagcgcacgctgatcggtttctatgtgaacggtgaagagtcggctgcttccaagtggctcgacaaggtgaattttgacattcagagccagttggaatttaagtcggcaggtgccgacttgaacgtgaagagcgtgcgtatctataacaaggcgctgacctcggacgaggtgctgaacaactacatcgtggaccgcaaccacctggaggatgccgacggggaaccgggcgtgcgctcactggatgaggacaaccgcgtgctgaatgaaggagatacggtgagcatggagaagctgatggggctgatgaagaagcgccggaactcgatcctggtactgataggcacgggcagcgtgggcagtgaggttccgagcgagagcgacacgctgaacgtggtggatgcactggcccagctgaacgacaagaaggccaataaactggtaagggaggtccgtttctataacggagaggacaggacgcttgactttatccttaccaacgtatatgtccgtattcagggtacttcttccgtgaactatgccagaaagaacttccgtttctacttccagaagacggcaagcggctggacggttacattgagctacggggagattgacggaaacggcaggcagaagaatccggtggtaactaccggcaaaaaaaatctcttcaagttacgcaggaactcggtaggcgcgaagctggcatgttccaaatgcgacttctcggactcgtccatgaccaccaataccggaggtgcgaagcttatcaatgacggactgaaagagatggggctgcttacgcctgcccagcgttacgccaaagaccatgggctggaggatgattaccgttcggccatcgacggcctgccgtgcgacctgttcgtagcgaagagtgccgacgaagacctgacctattacggccagtacaacatgaacaacgagaagagcgacagctaccccatcttcgggcaggatgagaccatcggcggcgagaaatggggcgagggcgacacgctgaactacctggaagccgacgaggaaggacacaagcagtacctgcccgtctgcttcgagacgctgaacaactccaatccgctgtgcctgttccactggttgccgagtaccgaaccggagcataaggatttcatggactacaactttgacggaggactggaatttaatcatccgaaagataccttctggtcggacggaggcggtgacgcggaggaagaaccgaacctgaaagaccacctcggtaccggtgacaagtacgacaagatgtacaaggccaccgaccgcatgatgagtttcgtctaccggtgcgtaaaggaaacgcctgcgggcaggaacatggtttacagcacggaatcccattcgttcgagggggtggactatgaggacgacggcgacaagttccctaccgccaagtggcagagcgatacgttcaggaaagaggccgggaagtatttcgaccttccccacctgattgcctactatctgtacgtgcagttcaacctcggcgtggaccagcttgcgaagaacatgcttatccgcacatgggacggtgtgaaatggtcgattgactattatgacggcgactgccagctcggttctgacaacaagtcgttcctgaccgggaagtatgacgacaaccgccagacgaagcgcgacggggcttatgtgatgcagggtcataactcgtggctgtggaacctcatcgtggccaattgctgggacatgattgtggagattatggtgagcggatggaacgggggcgcaagcttcatgagtgccttcagtatccagaaagccattgaccatttcgataccgaacagatgaagaagtggtgctcacgcctctataacaagtccggcatcttcaaatacatctacccgttcctgaacgaaatgccggtgggtgctgacggtgccaaacagacctatccgcaaatctacggtctgaagggttcgttgaaagcacaccggaactacttcatccaacgccggtatgacctgaagcaggtggagtacggctatgtatccacgctgggtgcccagttctaccagagtacggcatcgctggacaaggcttataaactgaaaccgatgcagtaccggctgaccatcccgtaccgtgtgcagctctccaccagcaacggcgtgcaggccgacagcggcgtggtggatgcggacgtgctccattccctgcagctgacccgtgccttcggtgagaacgacccgctgaagattatcggtgcagccaaaatcaaggagctggtatggcacgaggatgcgttcgcaatcggcttcaacttcggtctgctgacctcactggtaaaactcgacatgagcgtggagaaagccagcggttaccggaacggctcgttcatggcttcgaccaatggtatgctgcttctggaagaagtgaacatgcggaacaaccggctggcccggaacggggacaacgggaatgtggccactttggacttgagctggcagggccgcctgaagaaactggacgtgaggggtacggggctgacccgtgtgaaactggccaccggtgcgcccgttgtgcagttatgcctgccggacacgattgaggaactgttcctggaatatctgaccaagctgtccgatagtggcctgatactggaagggatcaataatgtgcggggctaccgctacaccaactgccccggcatcgacgggttcgctatgctggaacgcctgcaccaggccagactgaacggcagcggcaagctggagcgcttcgtgctggagatagaccgggaagacgacggaaccctgctgaagaagtattacgactacggaacgtatacacagacgggtgccgtggatgaccggcattcgggactgaggggcaagctgaccctgacgaagtatctggccgatgaggaactggagaagtatgccgcccgttatccggaactgaccatcaagcagccgccctatacgatgatcgagtttgacgacagcgtggccgacgatgccaatgtttcgaacctggacaacaagacggggtacaaattcggcaatacgtacaaaatgagcgggcatgtgaatgccatcctgtccaagcgccaccgcgtattggccaaggtgacgaagatgcccacgagccggaaggtggagatagccgggcagcaggtggaagtgaacaacccggacggggagatgacctatttccccctgcatgacgaaagctcgaacttctatgccgatgcggaggatatgaacgactgtacggtggcgaagctggacggcagcgagggagactggatgatgtatgagccgttttactggagcaaaggcatcaacgattatttgaacaacaagaagtacgcctgctacagcagttatccggaggacgaaatgcccccggtgcctgaggcgacggtactgacactggatgccatcaaggagacacagggcggctggctgggtgaacgcaagatcatgagcggcaagcccacgctgatggaatcctatacgacggacaaggcttattccgtgtgcaaagtggacgtgtcgggttacagacgtgtccgcttcccgagcgttccaggaacagggcttatcggcagtgtgtttgctgatgcggagggaaacatcctgaagagtattgtggtgccgaccatcggcttgaaatttgaagccggcatgtatctgatagcagacgttccggaacgtgctacagccctgcatttctccattctgaacacggcagagtttgactgcgtggtactgagccacagcgacaagatagaggacatggaaccggattgggtggccaatgaggagcatctgtgtgccgttgtgggcagttcggtggtgggcagtaaactgcgtgcctgcatcaccggagcttcgaccacggcaagcatgacctggacggacttccactactacagccagcagcggggtatgcagcagatagatgcgctgatgcacagccgcatcgcgaacctgagctatgcaaagtacgggcgcagggatatgcaggaacaatgcggtgccggtcagcataacaataaccgcacaacaggcggaacggccgaacacgggatgacagacaccatcggctacgatgaagcgtatgtcattaacaacaaaatcacgaattcgctgattgacggcctggtgcaccagtatgcctggtataagagtcgggacgaatacggacaggcgactgtggtgcaggtgaacaatatctgctgcctgggctatgaggacatctacggcaacaagtatgacatgatggacggcgtggatctgccgaacgacagcggtaacgtgggcaaatggcgcatctggatgcctgacggcagtatccgtatggtacagggcaagaaggacagcggtcagtggattacaggcgtggcgcacggcaagtatatggacatgattccggtaggtaatctgaacggatcatcttctacttactataccgacatgtactggataagcaccgctacggtccgtgtggtctatcgcgggtgcctcaatgcgggcgcgtatggcggtgtgtcgtatgcgagtgcgaattacgatgcttcgagtacgtatgcgaatatcggctcgcgtctggccttccgcggcaaaatcgtccgggcgcaaagcgtggcagcgtacaaggcgatacgcgaggtggcgtaagcgcaaagcgccaaagcgtggagcgaagcgactaaaacgaaagaacgggattcggatggtttccgaattccatttaaaaggtattcaaataccggcgaagccggccgaatttttttagaatattgatagggtaggggaatacaaaactgaactgatttgagggtaaacgacctcaatttaactatgtaaagatagtgatttttgttgatatttgcaagttatttttctgttatttttagcttagaattgaccagttcaaatggaataaagagtgctttaaattatacgcttcgttttgtgaaatgaacttttcattttgaaacgcgcgaacatttcgatttgcggattataataggacatcggctggataatcccaagcatattcttgaagtcgttagcaggaagccattgttgcccttctacccttatgcctaatgtgataagtgaaatgtataaatcttttgcttcttccaatgagctgggatggtcataatctgatacaccgtagcaatatatattctccaaccaatcgttatataaatcttctggtatgaaattagcgtacggacaataatccttgaataaaacatatcctcccgcatcggaaaagtattttatcatctctattccgattgtggtctgtttatataggtcccatgtgtattggttgaaactcatggcgtttatttcatcgtattcatcctaatgcttagttttactaaagctagtgccttaactgatgccaaaggaaaatctttgggttgatggtgctgattgtaacttaccaacttaatccaatcacctcctttttcagattgatttatgtattttacagttagatattcttcaccttctacatctattgaaaccaaatacatttccccataaaaaatgtgttggatttctacgggaacttctttataagctataatatctcccgatttcaataaaggatacatagaatctcctttgacatatacagcaccgtcacatttcggtatgttggggatacttatctttcctagtatgttttggtctttgttcaccaaaagagatttcaaatttgcggcagcctcaatgtcatatagattaattatgccttcttcatctatcctttctatatatttaggcttattgataatcgtaacatctcctagttcaatctcatcagccattgcctgttggacaagatcgcctagagacatatccaaggctttagatatgattatcaattctgatagtcttcttttagataaatcatcatatctacctatattggtagattctatgcctaacgcatcagctattactttatttgtaacaccttgatttctaattatttgtcttaatgttatcattttagattaatcaaattagatattattaacacaaataataatcaaaaatgatatactatatcaaaattgatagtatatttgcattatcaaattaaactgatacaaagaaacgaagattaattcagatttcaaatagtataaacatattaaaatacacgattatgagaacaagagaatttttacacgaagtaatgagccttgcttggcagttcgttaagcgtaatggctacaccatgagcgaagcaatgaaggtcgcttgggctaacttgaagttgaaaggtgagatgaaaaagaagatagtgaagttctacttcaaaaaagtggacggttccgttcgtgaggcatacggtacactaaatgaaaagctgatgcctgccatcactggtactgacaacagaaaaaagaatgataccgtccagacttactatgatactgaacgccaagaattcagatgcttcaaaaaagctaatctgatgtcaatcgcataaaagatatggatatgaatgcttacacgattaaccagcagttggatagcctttataaagatttagaggctgcccataacaatgatgaagaggctgtctgcctgatgttcaatgctgatagcaaaaaagaagctatccagttgataacggatgagatagacagtttggaagatgccttaaaaggttttgaaacttgtgaagatgatggcatggactacgatgctctatgccgggtacaaggtatcagccgatacgcataatacacgattatgtaacgcacgacagccctacagacggattgaacggcaaccgatagcgagaatcgggtagggtactattgattagttctttgaaattctgtaaaagcaattacggtgtaattcataagccgtttttgccaaccaaagataacaaacgcacataagcaagttggagcttgtgagctgtgcaatgtttaacaattaatagaaaacaccgcaaagaatcgtctttgagcagtgggcatacgggttaggcgtccgtactgttttcgacaatatagcctgtactgaactgaaataaggttctgctattcgattagggtacaggtacttatttaaatttatacgattatgaaaacaatccaattcattttatccatattggttagtatatgcgctgccggtatgctttacggggctatcactacttacagtcctatgaaaatattctctgtcactataatgggtgttatatgtgccggatgtgcttttctaataagaatctcttataaagagttgaaataaatgacaaattgtaataccgctaaaaggtagacctcaaatccggcacaaggcgcatgggtatgagtgcacaataaccttgtaaaccagccgggcggtaatttatgaagtagcattgttggaatgcgtgtaagcaattaattgttggtattaactcatattctgatttctatattcatctggcttacaagaagtaggttcgactcctacctttttaacgatgttttaaacttatacgattatgacagtggaagaattaagaggcatgacgcatgaagatttagtaaggcgtgtgcaagaactggaagaggctaacgaaaaattagctgaagagaaaaaaacatggtataaatcttggagtgatttgcaacagaagtttgatcatttcaagaatgcggttaaaagcattgttctgataatagattagatattcgtgttttattttgatgtttgtactgggtgtgccgtccgtgaggatagtgcaccttttttaatcggatggttagcttatcggttagagcttcgtgctgtgcaaccaattggcacgattgagaggggttcgattcccttaccatccacgaatcattaattaaattttattcttatggcaaaagaactgaaagaaagaacagaaatcaagaaaaagctgaaaaagaagaatgacagaatcagctttgactttagcgacaagcttgccggacagcttcgcaggtgtaccgctgatcttaacaggttggcaaggattgaccggataatagacaaggagcaaacgttgtattcggtggacactaacagggaagccggatatattgaggttatccgcaattattaatcagccgacttacacgattatgaggagagtttttaatgaacttacacctgaatgcgagattacggcacgaatgtatgcacaagggtatgagaagaaggagatagccgatttgaaatgcagggctgtgagcacaataaacaaccagttgcagaaggctttcgagattcttcatgtaagaaatggaagagaactggcgaccatgctatatgagcgtttggctggcatgaaattcactatggatttcccaccaatagcccgttctgttatcgcctgttgtttattatgtgtgttttcaattacgttttatcaggatttccattcggatatgcgtagggcaagacggattagagaagagaaaatagaatttctgaaagatatgatatgaaaagaggaaaggttgaatccgtacagaaactttggcttaataaggatgaagcgatggcttatttggggtgtagcgttgattaccttgataaacttaggaataacgcccaggtttcatttgccaaagatggaaaaatgatttggtacaatttggagtcgatcaatagatttttgaatagaatgaaagtaatataaaccctttaaattttacgattatgagtcttattaaaaaaagcaatgaattagtaattcctaccacagtgaaaatgatgatctacggtcaggctggtatgggaaaatcaacagtggcattgagcgcaccgaaaccgttattattggactttgataacggagtcaaacgtatgaatatggcgcatttggaaaacatagatactgtacaggtcacttcatggagtgatgtccagcaggtcttgcaagaggacttatccgcttatcagaccattgtagttgatacaatcggtaagatgatggatttcatcattacttataaatgtggcagccgccaaccgtctatcagggattggagcggtatcaatgcggagttttcatggatgacacgaacactctcggggcttaacaagcatattattttcgttgcccatcgtgacacaagaaaagaaggtgatgatacggtattcattcctgctttacgtgagaaatcctacaattccatcgttactgaactggatttgctcggttatcttgaaatgaaaagcgaaagaggggtacaaagacgtaccattactttcgacccgacttcaagaaatgatggtaagaatacctgcaaccttccttcagtgatggaggttcctaccatcctagacaaaaacggtaatccaaccgccaagaacgactttatcactaccaagataatcaattcgtatttgggtatgcttgcagcgaagaaagcggcacaagaaaagtatgataaggtgatagaggaaatcaaagaaagtatcgaatttataactgatgccaagtccgctaatgagttcgctgcccagattaatgagtttgaacatgttggtagttctttgatgatggcgagaagtttgtttgctgcaaaggtaaaggctttgggactgatattcaataaggaaactaaaatatactcagatgcagcctaatgagatttggaaagacattcaaggttatgaaggactctatcaagtaagtacccttggtagagttcgctctttagataggcttattaaaagcaggtatggtaattttagaaagataacaggaaagataattaagcctaataaaatatggagtggatatttacgaatatcactatggaaacaacaacaagttgaatataaatctcttcatagacttgttgccgaaacgtttattcctaatccgcaaaatttaccatgtgtaaatcataaagatgaggttaaaagcaataactctgtttctaacttagaatggtgcacatggagatacaatgctaattacggaacaagaaacgaacggtttagcaaaaagaaaataaatcacccgaagatgtcaaaagccgttgttcagtgtcgagaggatggtacgttaataagtacatttgaaagtgctaaagaggctgaaagacaaacgggtattaacaatgctaatattatcagttgctgtataggtagaagaagcttccttacagcaggtggttacaaatggaggtataagaatgagtaaaatatcttacaaaatatacccaacgttgctggattcttatcaaaattatatagatagtgataagatatatcaaaaatattacgctttttctgataatcccccatgcgatgaggatgagtttagggaaaaacaattccaatctcttattgataggataaatagagtacctttcgatagtgaagctgctgatagaggaacgtgttttggggaaataattgattgtatgattgagaaccgtaaatcttctataatggaaattagcaaggcatatcacgatgacggaaaactttacgggataaaagctgtttacaacaatcgcactttcacttttcacattgacctttgccgcgagtttgccaactactacaaaggagcattaacccaacaaagagtagaagccatcttgcctactgcatacggcaatgttttggtttatggggtaattgacgagctgatgccggccagcgtccacgacatcaaaacaaccggaagctataccgtagggaagttcaaagaccaccatcaacaccttgtttatccttatgctttgatgcagaacggttcggatgtacggacatttgagtataacattgtagagttcaacaaaggcggttatgtggtagatacctatacggaaacatacgttttcaatcctgaacgtgatattcctattcttactaatcattgtgaggaatttatccggtttttggaagaaaacagagaacttataaccgataaaaagatattaggaggagaaaattaatggcaaaccaaataactggacggataatcgaaatcggacaaactgttcaaataccatccaaaaacggtggttcctcgtttacaaaacgggagtttattttagatgctaccacttacgacccttatacgggagagcgtagcgagtatgagaacattattcccttagagttttcgggtgacaagtgtacagaacttgaccgctttaatcagggtgatgttgttactgtatcatttgtcttacaagggcgttcttggacgaatcaagacggagaattcaaacgtatggtatccattcgatgctataaaatagaagcgcgtggcggtgtatctcaatcccaacagacaacatcgatacaacagccagcgccacaaccgacttatcagcaacagccgcagaactttccgcctccggttgatgctaatggcaatgtaaaggatgatttgcctttttagcgtatgctgttcgacttgaagaatgatatggaagagatttggaaaacagtaaaagggtataatggatattatcaagtttctaatacaggtaaagttcggaatcctaataaggtgcttactccaaatgttggagtaaagaacggatatgtttatgttactttgagaaaagataaaagactgttacatcgaattgttgcagaaacttttatccccaatccatttaataaaccagaggtagaccacattaatggaattagaacggataataatgtttgtaatttaaggtgggtaactcgcacggaaaacaataataatcctattactaaaagccgttttagtaaatctgctaaaggtaaagttatcaatgcagaaactaaaaaacgaatgtcaatgagccgaaaaggggaaaaacatccaatgtataataaaaagcattcaagtttttctaaaagaaagatgtctataactcattcaattccagttgtgcaatttggattacaaatgaattatatagctgaatttgaaagtgcaaaagtggcttctcttgaaacacaagttgctgcatcaagtatcaatgcttgtacgctcggcaaaaggaaaacggctggtggctatatttggaaaaagaaaaatgatatttaatttatcaaatcattatgaaatacccaagttcaaggagtatgtaaacaagctgtttagtgaatgtgcggtggtggaagtgaaaaagaaactacctaaccgcacgcttgcccaaaacagctacttgcatcttcttttagggtatttcggtagtgagtacggttgcagtctcgacgaagcaaaaattgatttttataagaggacttgcaaccgtgatttatttgagagaaagacggtcaacaagaaaggcaatgaagtaacttatttgcgcagttctgccgaactgacaacaggtgaaatgaccttgagtattgaccgtttccgaaattggagcgcatctgtcgctggtatctacttaccagcagctaacgaacaacaaatgcttatttacgcacaacaagaaatcgaacgtaataaagagtttatttgattatggacaaatttttaggacaagaaatccttgaacaggaacgttggcagttccttcaggataatgccgatgcagtagagaaaatcggttatacccaccgattcacacccgaagaattggcgcaaaagaaagaaacattagccgaggtatcaatcaccatcaatgatattgagattgaaaagaaagaggctatggaagagttcaaagaacgcctgaaacctttgaatgaagaaaagcaggaacttctggaccacatcaagagaggttctgagtttgtggaaaatgaagaatgtgccaaaattctctaccatgaggaaaagatggcaggattctataacaaactgggtgaactggtttacagccgtcccatcatgccacaggaaatgcaaaagacagtattcagtattaaccgtaaaacaggaacagataattaattatgagcgaaaacaaaattaacttggttgtgccgaaagactacaacggcgcaccgattgaagtagtattgagagaaggcaaagcgtccgtagcacttgacccgaaagaaccgaaaagagtagttatcaatggaacgatagatgcacctttcagatggctggaaaagcgtgtcgaactgattaatcagaaatcctcaaatatcattgtcaaccgtgacaagatgggactggcattgactattgatgaaaccaatttctatcagacagaaatcaacggcatattacaggcttcaaaagaaatgatggagttcggcatcaatacagataagaaatgggagcccatcaagctgtcccagttcttcaagatgcaccgggctttcttcaaagacaagtccgagaacatgaccttggtttctactttgaagaatttcaaggctaaagtaaatcaggatattgagcgcagcaaggaagagaatggaagcaagacagacaattactcgcaagtggtagattcaaacctgccgaaatcattcaaactgaacattcctcttttcaaaggttttgccaatgaagaaatcgaggttgagatttacgcagatgtggatggtcgggatgtttctctttccctcgtgtctgccggagcgaatgaagccatcgaggaatacaagaacaaggtgattgatactctgattgaagcaatcagaggcattgcgcctgacatcgtaatcatcgaagtatagatttcgtttacacagggataaaatagtcacagggcgctaagactaaatgagctgaagttccaagtgcgcataggaatggaagccatcaagaccgtagctgtaaataacaggttaagtagtttaaagatcgtaggatagtcaatctacggacgaaagcgagaaagcagacgatacttgtgcaggttcgacccctgcttatccctcataaatgtgagccacacataaatggcaagggttagtgaataatggttgtgccccggagaatgcgcttcggggctttaataaaaaacaacatggaaacttggcaagaagtgacggatttaaagacgagcatcataagacactttcaagaggaagtaggtgcttcgtatgattttagagatattatagacaatctggatgacgatgaggttctggattctatcataagtggcagaaagcaacaacgttttaattttaaaagataagatatgccatactacataaaacgaaaggctaagaagaaaaacaagcctttacctctgtttgataaagcagggataacagtaaagaagaagccggatttgaaagctaagctcgacaaggagttttccctttttatccggcttcgtgattgtatgccaaacggttccttccgatgtatatcatgtggacagataaagccgtttacacaagcggactgcggtcactatttcagtcgcacacatttggctacacgtttcgatgaagataattgccatgctgaatgccgacactgcaaccggttcaaagctgaccatttggaaggctaccgggttaatctgatagctaaaatcgggcaacagaaatttgacttgctgaaagtaaaagctgctggtacttctaagatgtcagattttgagtacgagcaactaattaagtattacaaagcactcaataagaaattacgaaaggagaaaggaatatgaaatccactatcattgaagaagttgaatataaactcacaccgataaaaaaagaaaataagacaatagctttatttatcctcactatgcccaaaaacaattcatggaatggtaaatggactggagaaggaaatttatatgcctattcgcaggttgcatttagacgtggaaagccaatctattcaaatctaaaagaaggaaacttctattatgattttggcgatggatgggtagcaaatgtggaagtcagatatgttacaccaagcgaatctaaaaaaataatgcggaaatctaaaggtttctgtggatatacttggatgtgcgatgagataatgaaacttggaagaatcagaaccgttacagaaagaagagcagacaatgtacaaactacgtgattaccaacagaaagcctctgatgctgccgtttctttcttcaacaacaagaccaagaaaactaatgccattatggtgttacctacgggcagcggaaagtcgcttatcatagcggatatagccgcaaggcttgacggacataccttggtgttccagccaagcaaagagatattggaacaaaattttaagaagctctgttcatacggtattcttgattgcagtatctattcggcttcctttaattcaaaggagataagccggataacatttgccaccatcggcagtgtgaagaatcatcccgaactgtttacccacttcaagaacatcattgtggatgaatgtcatcttgtaaaccccaaagagggaatgtacaaggatttttttgatgcagtgaagtgtaaggttcttggactgacagcaacgccataccgtttaagctccagccgtgatttcggctccatgctgaaatttatcactcggacaaaacctcatgtcttttcagaggtcatttatcatgtacaggtatcaaccttattagatatgggctacttggcgaagttggattactattcaatgaatccttcagggtggaatgaacttaacttgaaagtaaatactactggtgccgactatacggataggtcagttcaaaaagaatatgaacggatagacttctacggttatctcgttcatatcgtccaaaggctgatgaatcccaaagccggaggaaaacggaagggtattttggtctttacccgttttttgaaagaagcggaacggttaacgatgtcaatacccggttgcgctatcgtttcaggtgatactcctaagaaagaacgtgaacatattcttgaggcgttcaaagctggtgaaattccggtagtagctaatgtgggtgtacttacgactggctttgactatccggaacttgatacggtcgttatggcacgtcctacaatgtcacttgccatgtggtatcagatagtcggtcgtgccatccgcccgcatccttctaaagaatgtggatggattgtggatttatgcggtaacatcaaacgtttcggagaggtgtcggatttacgattgtttgatagcggtaatggtaagtgggctgtattttctaacggaaggcaattaactaacgtgagattctaagactatggacgaaggatttttgaggctaagccgcaggtttttctcgaatgaaatgtggaatgaagcccgtacttttagcagttgcgaagcgtggttagacttaattcagtctgcacgatttgaggcaacgccccgaaaggagagtatcggaggtcgagaaatctcttattcaagaggtcaatatcctgcatccataagatttctgtcacagcgttggaaatggtctgaaaagaaagtgcgttcctttcttgtgcatcttagaaagaaaggtatgataactgttgagtgcaatcaaggaatgaaccttataaccttatgtaaatatgaagaatataatccaatgggcacaaccaaggacacaagtaagggcacaggtattgaaaaggaaatcaatgaattaagacaggaatgggcacaactaagggcacaacttggggcacagtccatgaacaacaatctaccgcaatccaaacttttacaaaaatcagggcacacagagggcacaaatataaagaaagaagaaagagagtatatagatatatctctacatcaaaagaaagaaaatactcctgacggagtatcaaagaaagacaagctttcttcgccctccccctctgaaaagattgattacagcggattgatggaatactataataccacattcaaagacagactccagcagataagatcaatgactgatgtgagaaaaaaggctgtaaaagcccggatagcccaatatgggaaagagtcagtgaggagtgttttcaatctcattcttcaatccccgttcctacttggagctaatgaccgcaattggaaatgcgactttgattggattttcaaacaagcaaactttactaaaatattggaaggaaactataatgggacaagacttagtaaaaatcaacaggatagcgagctgcgaaaacgtgattcagttcttgcagtcgctacaaccgttagagaagctgccgcaaaaaagagaaaggaacttgaagcagagggcgttattgaataaatatcccgatcctgcacaattcattcttgattacaaccctgatttgcagttcaaacttgtcagatgtaatgcaacccattcagaactggcgttgaatgacagcattccgagttagggctattgtcttctacttatggggatgaaacaccgatagaatggctaaagatacaatttggctcattgaatgactttgcagaagtttcaaccaagatagcgaaagagcaactttctgaactatcggagatattcctttcggagtattattatataaatgccgctgaaatctgttttttcatagcacggtttaagtcagggaagtatgggcggttctacggttcaatagatccattgaaaataacaagtgcgatgctggactacgtttctgaacgtcggaaagatattgaacggaaagagcgtgaacgatacagaaaccaacgtgaaaaagagatagaggagcgtggaaataacagaatctcttatgctgagtacattgaaatcaagcaccgtgctgatgcaggagatgaggaagccagaaaaatgctgatgtcaccatgagaataaccgtttactgggtaacaagaaatccggatgttatcgtaagaatccggaaaaagttcaatatcccaagttatacttccgtgaactacgaaacagaatgtgaaatcaaggatgaagacttttcactgttagaagaaacagaacgaaggggatttattcaaattagaaataagaatacacgattatgaaatcattaaaagaaatactaaggagtttagaaggtctgtccgatatcgaattgttcgtgatagaccttttttgtggtgccggcggtttgtccgaaggtgtggaagaagcacgattggatggaaatagatgtggaaaggttgtttgttgtgtgaaccatgacaagaatgccatcctttcacatgatgccaatatccctgatgcacttcactttattgaggatatccgtacactggaactttccccgataagcactattgtagaacgtattcgtcagttataccctgatgccatgataatgcttcatgcttctttggagtgtaccaacttctcgaaagccaaaggcggtcagccacgtgatgctgatagccggacactggctgaacatctcttccgctacattgatgtgatagatcctgattatattcagattgagaatgtggaagagtttatgagctggggagatatggacgaaaaagggaagcctatcagcatggacaaaggcaggctttatcagaagtgggtgcgcaatgtcaagaagtacggttacaactttgagcaccgcatcctgaacgctgccgacttcggtgcctacaccacaaggaaacgcttcttcggcatctttgctaaaaagagcttgccgatagtattccctgaaccgacccactgtaaaggtggcaggcaggacatgttttctaagctggaaaaatggaaacccgtcaaggaagttcttgatttttctgacgaaggaactaccatctttagggaaaagcctcttgcagagaaaacgcttgaacgcatctatgccggacttatcaaatttgtagccggaggaaaggatgctttcctttcccgttacaatacggttcgccctcaagacacatgcaaatcagttgatgaaccatgcggagtgttgactactgaaaaccgctttgcaaaggtacaggtaagtttcctctccaaacagttcagcggacatcccgaaagcaagaatgtgtctgtagaagaaccggcaggtgcaatcacctgcaaagaccaccatgtttttgtctctgcttattatggaaatggacataatcattcggtagaccttccagctccaacggtcacaacgaaggacaggatggctttaattgaaagccgatttatgtgttcttataactttaaggatacaggaaaggatattaaccagccttgtcctacacttctgacgaaagacagactttctcttgtatctccgttttttatgaaccaatattctggaggtggtcaggtgtctgatataaactcaccatgccccgctgttaccacaacaccgaaacaaaacttggtaacatgccagccgtggataatgaatactgcattctcaaatgtaggtagcagtatagaggaaccctcccagaccattaccgcaaacaggaaatggcactatctgatgaatccacagttcaacagtgctggcggctctgttgatagcccctgcttcacattaatagcccgcatggataagatgccgccctatctagtagcaacagaaagcggtcaggtagcgattgaaatctacgacaatgatagtcctatgaccgtgaagataaaggagttcatggcactgtatggcatagtggatattaaaatgcggatgcttcgcattccggaactcaaaaagattatgggattccctgaagattatgttttaataggcacacaagctgaccaaaagaagtttatcgggaatgcagtggaggttacacaagcgagaaaaaatactgaagcactttgcaaagtattgagaaagttgagattgaagaaatcaaaagaaatagcttaatggaaaatggaaaacttatattagatgcctgctgtggcagtagaatgttttggtttgacaaacataatcctcttgccttattcgttgataagagatcggagatagtaacagccaaggatagagataaaatcaggaccatagagataaaaccggatataatagccgatttcacccacttgccgtttgaggacaattctttctacatggtggtattcgacccaccgcacctgaaaacacttggtacaacctcatggatggctaagaagtacgggaaactgccgaaagactggcagttactcatacacgatggatttactgagtgtatgcgcgtcttgaagcctaacggcacgcttatattcaaatggaacgagagtgagataaaagctgcggaagttttgtctgttatcccgttcaaacctcttttcggacatactactggaagacagagcaagacaatatggatgtgctttatgaaattgccaattaacgaataactataaagaaatgaataaaactcaaaagaaattgttggcaaggcttatggctgttacaaacagccttggcggaacgcttgacggtactgctacctgtgagcaaaaatacattgataggcaacgtgctcacaggctctcatacaaggtcatatatggtttatttggcgataatcctaacaatccctatcgtgaagatgatataaataatgcctataaagctattgaggaaatggagaaactggtacaaaaggtatatcctgaccggagtggctttttgaaaaatgaagaaaaacaataaccctcaaaactgattaataatgaattaattcacaaatgtgctaatatgccaattatcatgcggaatagagcgcagccaattggcatattagcacattgacccattggcaaattattcaaaaccgaatagaaatgaacacaacatttgaaaaatcgtctaattctaccgatgaatggtacacaccgaaagaaattatagatgcattagggaagtttgatttagatccatgtgctccggttaacccactttgggaaacagccacacaaatgtataacaagaatgatgacggactatcgcaagaatggaaaggtcgtgtatggctcaatccgccttactctcgtcctcttattgaacggttcgttaatcggttggcagagcatggtaacggaattgcattactctttaatcgttgtgactcaaagatgtttcaagatgtaatatttgagaaggcaatagcgataaagtttttgcgtaataggattcgtttttttcgcccggatggtacgcgcggagattcacccggttgtggttccatcttaatcgcttttggtgaagagaatgcagagatactaaggacttgttatatagcaggtaagtatgtacgaatcaattaacgtaaaacagagaagaaagaggataatcgagatagtagcgaacttactttctttttggataccaaagatttgtcctaccactatcatagagagtggtcaacagaaaaatggcatggagaacgtcttgggttaaatgcaataaagtttttgattgaaaagggctatgatgtgccaatttattaattcaaataggaacagattatgaatgaagttagaaagctatataacgatgatggatgcgttcttaaagaggcatctagcaatgactatgaatcatggagttcagcaagaacacttggtcctatggaaagaaggaaagaatacagaaacctatgttataattttgaatatgagcggggaactaatatccctcactgtgcaaagaaaggtgtatgtgatgaggattgcgaatacatgagaaactttaaagaataggatatgaaacaaacattagaagaagcagccaaaagtatggcttacgataagatgcctgattggggaggattgccaatggtagcaaaaaaatattttattaaaggcgccgaatggcagtcaaagcaatcaccttggataagtgttaaggaacggttgccagaacaaaacaagcttgtcctttgcagaatggtatcaaatggagcgattgttagtggttatatcgttgtttcacccgggagatcgccatacgttgcgacagacggaggatttgaatttgaggattggaacgactacgagtgtgacatgtggatgctcattccgtcttttgatgaaatactcgaagccaataaggatgtacttgaacggattaaagagaaaggagattaatatgggatatagatgtccgggatgcggaaaagactttgggattgacaaggaagcattgtatcatcatctcgattttgaaagcggtgagtgctctacatacgcctatgctgctcttgcaggtgtaaaaaggatattaggagagaagtcgtatgctgacaggaagttacaagatagaaaaagaatatcaaaatcttattcgcaaataagccccaaccataattggataaaacaaaatatcatcagtgatgaaaatggatatgatattgtagtttgttcacgatgcggcattaaagcaaaacgaagaatgagtagttttacttttgatatgagacaatccatgaagaaaattgaaaattgcattgacgaataaattttatacatggaaagatacaaaatgattaggaaatgaaacaggcattatcaatcgagcagatgaagcacttgcaggagtttgggctggatacaagcgatgcaagtatgacatggatgttgtatccttatgaagaagacaaacaacccaaattaagtttacgtgaatggaatactttcaaggaaccatttaggatacaacattgtatccctgcatttactttgcttgacgttttagaattgttaccgaaagaaataaaaacaggtacagataattattggcttacaatgtcccatgatagcgaaaaatggtatatatgctactcggagtttgactactataaagaatttaggtctcattcattaattgatgcggcatacgatatgttgtgttggtgcattgaagaagagtatgttaaagttggagaggatgaataactatggatgatttgacaaaaatattattttcagtagttcttataatgctatataactgtgcttgtggctatggatacgaaatatctaaagctgataatggaactcatataactagttctgtttatgaaggacctaatgatggtggtaaatgggatatttacgaagaagcacttgaagcaggattacaggaagcattaaaacttatatgattatggaaacagcagaagtaatatttaaatttatcattgtctcattaaatgcttatgctttgatgtttaccttaatcttggtaagtaagtggcacagacgcatggaagacaagctggataagatagaaggatatgtccgacatgtatcagatcgtaacgatattgtttacattaaccagctttcggaattgcaaagactgttgataaaagaagaacggtatgaggaagccgataatattggaaaaataaataaggatgaagaaattaaattaggactaagggaatgaagaatattaatttgaacgaactacgagatcgtgcttataagacagcttgcgagcacggtttccacgataaggaactgagtaatgaacactgcttttgccttatcatcagcgagcttatggaagcagtggaagcggaccgaaaagggaaacatgccgacagagaatcttttaaatcttcttatgaggatgaagaaccgcacgatgatgtcaatttcaagtattgttttgaaaaatatatcaaaggaacggtggaggaagaattagctgatgttgtgatacgctgtcttgaccttgctgggctgcgcggctgggatttgcaagatacgttggataatgtggatgaactcaatgacgtttcagactttttccaagaacacacatttgtagagatagtttttgatatttgcaccggaacaattatatccgaatctacaaggtcggttaaaggagtgattcttgatgtatggcaatactgtctttggaaaggaatagatattgagtggttcattgaacagaagatgagatacaatgaattaagacctatgttgaacgggaaaaagtattgaatatgaaaacaatattatttacaattatatgtattatcgccctattatgggttggagatctcacaattacatttaagccgttttctatatcacttcccggttggtataagcctgtaggtatccttctattttttctgtcaatggcggtatatatcacaggggattatatcaaagggtataaacaaggtttcgatgatggagtaaaggaatgtattgaaatacttaaaaagaaaaatccatgagcaaactatataaagtaatcattttcggggaatcattcttaatcgggtggttccctttttcttcacactggtacaacaagctaaagataatcaaatgatagtacgtcattttataagagttccggttggaagtactgtctattgcgacaatcagccggttaaaatactggagaaaggatatgcccttgctctatgtgatgtcaatgggaaacgggtatatatcacctgctatgatttggaaaagaaaccattcgtcagcacgaatgggggagaatgaaaaagagccaacccacgcacgaccatgaatcagctcttccttacacgattatgatgcaaatatactatttacttttaaaataatcgtgttatggaactggattttaacaaaataattcgtcttaaaaagattcgtattgagaagtctgaactttcggaagaagaaaacgctttgactgaaccggttttaaaagacaagagccttatccatgaaatctataaaatatttgttgaagtgctgaatgaaagaggatgtcccccaaacattgatagtgtgacccagagaaagaaattcatctttattatcctgtacctattttccccaagttcacttgccggaggaaaaatgactgcagggctacgtgaggagatgtcaagggtattgggtgttcagtccaagagtacaatttccgacaattgtgctgatgtcgtgtttctgtatcagaattatggggactttagtggagatatagagtatctttacaccgaaatcgtaaatcggttaaaattcaaagggctaatcaattaatgagccggagtgcagtactccgacttttgttatgtgtacacggtgttaaaagtaacaaatatgttatttctttcttcatctttgcttgttttattgtaacaaatatgttacttttgtagtgtcaattaaaaatgttctttgattttatgaagtattcagagttttacaaattgattgaatcagctggctggacaatcaaaaagggaaagaaacattataaatatgttcatcccgactttgactactttattcctgttggcagacatcagtctcaagagataccaaatggtactcttgacagtatgttgaaaaaggcagggttaaagaagtgaaaggactgcacccacttcggtgggtgctttaattgacgaatttaaaatacacgattatgaagaagattaaggcaattatcgaaaaggcgaatgatgggggtatttccgtatattcggaggatgtgaacggagcgtacggttttgggcttacagagcaggaagcgaaagatgattttatgtccgtacttgaggagcaggccggatattataaagaaaaacatggagactttcctgtgtggtataagtctgggtattctgttgattacgtatatgatttaagcggattcttcgaggcatttcctttcataaatgccagtaagtttgcaaaggaaattggcatgaatgaatctgtcatgcggaaatataagggaaagattgtaacagcttccgataaacaaagagctcttatacaagagagatataataatcttctcagaagaatggaagctgtcagattctgatattctagccgtgaggctctgatataaaatcaagaactaattgacaacagaaggcgcatcattttggtgcgcctttattgcttttaatgaggttatcaatgagtaagccggagtttaatgctctggctttacttttaatctttcacatatttttggtaatactctcttgtattacttgttggtaaaacaagtggaatggaaaactttattttactaacactttcattttgtattgcattttctgacgaagtaccaacatttataattttggcgattcctattcctgatttattaccttctttttcggtaacggaaatagctatgtccatctctatattttgtactttggtctttcggttataatattcataatgagattcattgtcaatataatattctcctttttcagattgaatatcatcgggacaaattaggacatgtttatctttgtatttttcttgtgtttctgaaacagcatctattatttgactaagtgtttcttttataaagtcttttagttccatatttttttatttatagtattccttccctcgtatattcttatgttccggcatacgtggttctccatcaaaatgtattttacctccgcagtgaggacagatgatagtgttggtatcatcttttatatccatatcatcaacaaagaaatcaccaaccttgcatccaataacatctgctattttctgtaatgttcctactgttggatttctactaaggttttgggcaagtgtaactcttgttatacccattttttttgcaactgcttccattgtgaagcctttctgcttgattattgtctttacttccatgtgtgtatgattttaatcagatgcaaatataggggtaaaaatcgaataaacaaattaaatcagcttgttttgattgaatatagtcatttgtattaaaatgtatttagattataatcatacttatgctgtttttgttaatatatgataataatcatacaaataacatatttatttattgtatgtatgattttaatcattacatttgcatcatcagaaacgaagtaataacaaataaaacgatatacgatcatggcaataaagaaggttgatgaaaagaaaacattgaagtatgcagtagcattctacttctgtacatcaggtaaaataaacttcatgttaggcaataaaatgtatcagcatataaatactgtttatgaccaaagagaagatggtagaggtttcaatacttgtgaagtcgtttataactacaaggctcaaaagtacgaggttctgaatgtagatacagagataggcaataaagagattacaatattataagtttaaccagcagggcgaaagccctgcgcaatatagaagaatatgaaagaaaatatatttttaaaagcagttatagaaaaaccgttattgaataatgaaccagaggttttacaccttttcgttcaaattatcaatgaaatcacttcttgtatgtcagaagacgagttaaagggctgtatgaactctttaacagtacaatacccttactttaaactgtttttcgattatggtttcagacataatcacatgtgggtgaaagaatcaggttctttggtaagattgatattggttgagttctaatccggtagccttcgggctaccacaatatacacgattatgaaagcagatctagttttagttatcagccctgaagccccactgatgaagcaactgggtaaagtattgggtaagatggcaaccccttatgacttctctactatagagaggggtgaaaagtacatcaccatacagcatgatgaaactgggcttgtagtggcttatacgagtgaagaaagattgaatgtgaaacattaaatatagattgattatgaacgaagaacttttaaaattagcataccaatctctcaaacgtcaatttgatgacattagcaaagatagttggatatgggctgatttctttgaagatgaaaaagtgggatttgattacttcaaaaaacaaattgaacaggacgaagatttcgcctccctgcaagacgagacatattacttgggcgaggatttagatgagctggcgtatgatatagcttatgaaattgcttcaaagttgagagaaaatgatttttttcatcaatgcggacaatgtatgttagagaacttatagaattgaatgattatggatagaggtaaagaaatagaattggcagctaattctatcatagatgatttgaacggcttagaggggttcgatagaactgatatgataaatatgtttggctctggcattacttgggcagaagaacatccaataacagacagtaacggttgtaaattctgtaaaggtgaatcggtaacagaatggggatgcttaggtcgttcaagaaaaggacgtttaaagtatggatataaagaaatcgttgaacctgtagattttggtaatacttgcagtctaacaatcactggaacaacgcttaatgtcgattacaacgcatattcaaccgattcttctttttatgatgaaatagcgattaacttttgcccgatgtgtggcagaaaactgaatgaagtagaaaataatgaaaataaatagcttatgaactcaattaacgacgaaagaggttgcagcgtatgtcaacccggtaaagaaaactattgcacttacattaccaaattgaaaggtaagagagtaagaatgtaccaatatgactatcgcactgaaagtggcgaactgtttgcttgttgtgcacctaccttagaggcgtgtagagaaagacgggataaatggcttagttcacgacaataagccgattgtcgtgtataacgattgaagatatttcgttatctttggttgtggtagtacctttggggtacaatcgcggggtggagcagttggttagctcgctactttgacttggtagaggtcggttgttcgattcagccccccgcaacaatgaatattaacttgaaaatttgacacgattatgaacattcttacattaagcatcaaacagaagtatttcgatgaaatcttggcaggcaagaaaacccacgaataccgtgaaatcagaccaacaaacgctaagaaatatatcacttacctatgtggcggtaaagaatatccgactgatgcagaactgcctgaagaaggtgaggtagaattgaagcctatcaagtacgatgcaatcaagcttctgacaggtgcatatacgggtaaacgtccttacatcattatagaggtaaagaatgcagaagcagtaattctcacagatgaaaacggtaatgatattgtttacgaacatcaaggcgaagaatatcttgccgcacaaatggattatactttgggtaagatattagagaaacatatagattgatttgtttaacttttaaaattagaaagcagagtcgcaagaagaattaacagagtagccggacctcgcagaaatatgaatggtgcaggggcaggtggtagattggttgccaatcgtagaggtacagcaagtgccacacagttaggatcacgcagacagcgttacagtgatcttcgtacttcatttggtttaagtggtggctagctatgaacaaagtagaacaagcgagccaatatatagacctcattcgggtaaaatcgaatgaggctttactgtttttatcacttggtaaagattcgcttgttctgcttgatttagtctatccgaagtttgaccggattgtttgcgtgttcatgtatttcgtcaagaatttggaacatattaaccgttggataaactggactaaagccaaatatccgaaaatagagtttgttcaagtaccacattggaatctcacttatattctccgtggcggtatgtattgtgtgccaaatctgaaagtaaagctgttgaagttggcagatgtggtaaaggctatgcaacttactcatggagtttattatacattcttgggcatgaaaaaagctgacggtatgaatcgtagacttatgttgaaagggtatgaggtaaacggctacgagaataacggtatggtttatcctttagctgattggacacaaaaggatattcttgcttatatgaggcagcataatttacccgaaccagttcggtattcattgaaagccagttcgggagtaggcttcaatcttgattgtatgctttggatggagaagaactatccacaggacttacagagaatttacaaaactttcccgatggctgaaagagtactttgggagtatcataatcaacaaaagtaatatgtatggaactaagtaaatatatcaagagtgaatcggtagaacttaaccgttctgccattcgttttgcagactacaatccgagaaaactttccgatgaatcacgcaaagcattaaagcgtggtatcaagaaattcggattggtaggtggaatagttgtgaataagcgtaccgggcttaccgtagtcagcgggcaccagcgtttgtctgtcatggacgaattgcaaaagtttcccgataacgactatcgcattcgtgtcgatgtcattgacgtggacgaacagcaggaaaaggagttgaatattctaatgaacaaccctaatgcacaaggttcttgggattttgacgctcttgcccgtattgttcctgatattgactggaaagatgcaggattgacggatgccgacttgaatatgattggggttgatttccttttgcagaccgaagaagaaagctccattgctgacgaactggaaagcatgatgtcgcctgtaacagaacagaaagaagccgataaagccgccaaacagttggaacgtgctgaaaaggtagcccacatgaaagaggtcaagcatcaggtgaaagaaaacgcacagaagcaagctgagaacatggatgcctatgtgatgttgtccttcgatacctatgaagctaaagccgctttctgcgaaaggttcgggtatgagccagatatgaagtttataaagggagaagtttttgatgaacaagtagaaagaatagattaattattgggaggaaagctgagttagaaagaaaacatatagccagttatatcagcagtccagacgaataatgtacaacgctggaagacaatacgggttaggttctgcaagacaaagaaacataagggatagaacgaaatccataatgggaagatatgctgagaaaatagatagctatttctcaaaaagaggagttgatgtctatggaaacaagccaatttctcgccgtgtatatatgggtaacaataacggttaaaattatgattggcgattttatactttggataaggaatgttctaaagcaaaacctgttttgtgttcatcattatgtttggaaaggtagtgtgatgttctctgagttcaggtatgaacaatgtgagaaatgtggaaaattaaagaagtaatatgagcaatagtgaatctcaaaatagaaaaggtaaaggaggaagaaagccaaagtttgattatacaagcgaggactttctttctctcgtggaatcgtatgccaaaaagggattcactgacaaggaaatagcctatgccatagggattttaccacaaactttctgcgaaaagaaaagtgagtacaccgaaatatccgaagtcttagcgcgtgggcgcgcgacaatcaatgccactgtaagggctaaattccttgcaatggctctcggtggcataaaaaccaaaagcaccgtggtaagaaagctccgtgattcagaagggaatttgacgggcgaagatgaattacaagtaagcgaaagcgagttggctcctaatttgcaagcaatgtccgtttggctgtaccaccatgatgaagattggagaaagattgagcgcaaacaagatgaagacgctgatattccaacagacatagagcatggcatcaacattgattcttggattaaagacaagctgaaatgatagtacctcaagaaatttaccatccattatatgaggataaggaaaaatttataattcttatcaccggtgggcgtggtagcggaaagtctttcaatgcttctactttcattgagcggttgacctttgaaatgacactggcagagaagatagttcatcagattctttacacccgttacacgatggtttctgccggtatgtctatcatccccgaaatgatggagaagatagatttggacggtaccacgaaatatttcaagaccacaaagacggacatagtcaataggatgactaagagccgtatcatgttccggggtatcaagacttcttccgggaaccagacagcaaaactgaaatccattcaaggcattacgactttcgtctgcgatgaagcggaagaatggacaagcgaagatgagttcgataaaataatgctctccattcgcaagaagggtattcagaaccggattatcattataatgaacccatgcgattccaatcacttcatttacaagaagtacattgagaaaactcacaagctggtagagattgacggtgtgcaggttcagatttccactcatccgaatgtgctccatatccatactacgtattttgataacttggataacctttctcctgagttcctgaaagaggtggaagatatgaaggtgagtaatcctgaaaagtatgctcatgtggttatcggccgttgggcagacgtggcggaaggtgctgtgttcaagaagtggggaattgttgacgagttcccggcttgggcaaagaaagttgctttcgggcaagacttcggttatacgcatgacccgtctgcttccattcgttgtggtatcgttgataacgccctttacttggatgaagtggattaccgtactggattgctttcttctgacatcatcaagactcttcgcccatggggtttgaaagtcatagctgatagtgctgaccctcgattgattcaagagatacacaacggaggaatcaagatatatgccgtagagaaaggtgcaggttctatcaatgccggaattgacaaaatgaaagatatggagatttatataaccaaacgctcatacaacttgcaaagcgagttcagaaagtatgtttgggcaaaggataaggacgggaactatatcaacgaaccggaagaccatgacaatcacggaatagatgctgtacgttactatgtattgggtgagcttcttggtaagattcagaaaccgaaagatttaacaggaatatttactcactaaaattatagattatgccattgaatttagaagaaatattagcattgcctgacatcgggcagaagataaactacctgaagaaaggtaggaagactgaacttcccgaccgttgcaaactttgggatgattggaatccggaacgccacgaaatcatggttgacaaaaagaagtatccggacagaaaggttcttgaaaaagaagcagagaaacacttcgatgaaaaaactggtaagacttatgaaatcgaagcaaagtataagactgaatcggtgaaccgtatttccattccattggaacaagatatagtgaacattcaaactgctttcacggtcggcacagaaccgtctatggattgcactccgactgatgatgatgaaaagaagctgttggatgcggtaaaggctgtatttaaatccaacaaaatcaaatatcagaacaagaagattgttcgtgcttggttatccgaacaggaagttgccgagtattggtatgtcactgatgatgattcattttgggcgaagttctggaagaaaataaagactaccttcggggggaaggtcaagcccaccaagaaactgaaaagtgtgttatggtctccattcagaggtgataagctatacccgttctttaacgatgaaggtaaaatgattgctttctcacgtgagtataaaaagaaactcatggatgattcggaggtcacctgctttatgactattacggacgaaatggtttatcaatgggatttgtctaaaggatatgaagaaagaactccttttgctcatggattcccaaaactaccggttctctatgcttatcgtcctgaaccttattgcaagaagataaagacattccgtgtccggctggaaaaactgttatctaattatgctgattgtatagactaccatttcttcccactgctgaagctaattggagatgtagagggtttcatgggtaaggttaaggatagaatggtcaaacttacaggtgaaggtgcggatgcccagtatctgacgtggaaccaagttccggatacggtacgttttgaagcagaaacactcactaatatggcttatgatatgtcaaacactccaagaatatcgtttgagacattgaaaggcataggcaaggcttccggcactgctttccgcttcatgtttatgggtgcacatatggcggtagaaaatcacggtgaggttatcggtgagttcttgcagcggagagtaaatttcattgtttccgctttaggctctatcaatccaaccgagtttagcaaggcatcgcagaccattgacatagaaacagaactggttccatatatgattgatgatttgaatgataaggtgactactgccgtttccgctgtcagtggtggaatttggtcaacacgtgaaggtatcatgtttgccgggaatgcggaccgcatcgaaagcgaattgaaagaaattgaagaggagagaaagatgaaagaatctgaaaagacaaagggggctgattagtccccttctttaaacttccagatatatccgtaggcttggcggtaaatacctctacaacatttaaggataaggcactataaaatattttgtgtaaatggaaatacgggattcagaaatgagtctcgtattttttattttatacatttgcaaaatgaagaagcttatgaaagaaaagaatcaagtagtgcctgatgaggttttaagcaagtttatcagtcagttcaagacagaagccgatgtgagcaagtttctgaagcagttgcatgcccaagtattggaaaagatgcttgaaggtgaaatggatgcccatttgggatatgaaaagaattctgtgataggaaataacactggcaactcccgaaatggcagttatccgaagaaaatccaaaccgaacatggagagtctgtcatttctattccacgtgaccgtaacggccagtttgagccgatagcagtgcctaaacatgaaagccgtggactttctatagaaaagctcgttatctccctatatgccaaaggaatgagcgtttctgacatagaggaagagatgcgtgagatttatgaaatagagctctctacatctgccatttccatcattaccaacaaggtcaatcaggctgcccaggagtggcagaaccgtccccttgatcctgtttacctgatagtctggatggatggtattgtcttcaaggtacgggataacggtaagatcataaacaagaccgtttacctttgcgtcggactgaaacagaacggtctgaaggaagtccttggcatgtgggttggcaaatcggaaagctcttctttctggatgggtgtcctgactgatttaaaagcccgtggggtgcaggatatcctgattacctgtactgacaatctgaatggatttacggatactatccgcagtatattccctcagtcatccactcaaatctgtgtggtacatcagatcagaaactcctgtaaatatgtggtttataaagataagaaagagtttacggcagatatgaagaatatctataatgcacccaacaaagaggttgcagccacagaacttgacaatctggaaaagaaatggggaggaaagtatccttatgctatactttcatggagaaacaactgggatgatttgactgttttcttccagttcccgctggaaatcagaaaaataatctacacaaccaatctcattgaaaacctgaacggaaaaatcagaaagtacacgaaatcaaagctttcattcccttcggatgatgcagtcaaaaagaccgtttatctttcacttatggagattgagaagaaatggacacagccgattcataactggggcttgattatgaatcaatttatgcttatttttgaaaacagaatccagatataagaacaaacttacagctgaatcctgtttccatttacacaaaattttggacagtgtcaaggataaagctattgcacccattaaaagctcttgcaatttcttttgaaccatgccattctttaataaatcctaagttcaagcggataatgcaacaggagtgagaatgatgacaatgagaagatacgaaaagaataatttttcagaggaacagagaaagaagatttctttcccttttgttcccctgtggaaaagttgtttctttgcatcttccagttccccaacattcagttgcaatatgaaacagctaaccgaagaacaaaggtataacatttccgcttatctgcaaagcggaaagtcaagaaccgagattgccaatcttgtaggagttcatcgtagcactataagtcgtgaattacgtcgtaatagtgataaacgtaatggcatttacaaaccggatctcgctcaggctaagtatatgtccagaatgcgttcacgaaagcacttcgtgaagtttacggacgacttgaaaattcaagtagatatactcataaagaaagatttcagtccagaacaagtgactgggtttatgcgaacaaagggcttggaaacagtttctcatgagacaatctaccagtatatttgggaagataaaaagcatggagataagttgttatacaagcatttaagaagacggggaagaagtcataagaagagaggtgcattgactaatggacgtggttttatcaaaaaccgcgtggacatagacaagcgtcctacgatagtagacaagaaagtacgttttggtgatttggaaattgacacagtcattggaatgaatcacaaaggagcactattaactataaacgacagggtaactggactagtatggataagactacttagcgggaaagatgccagcccgctaactaaagctgccatcgatgccttggaaccttttagagaccaaatacatacaataacggcagataatggaaaagaatttagttttcacgaagaaattgcacgtaaactaaatatttttgtttactttgcaaaaccataccactcgtgggaaagaggagccaatgaaaacagcaatggtttgattaggcaatacttcccgaagggtacggactttagggacataaccaatgaacaggtaatgcgcgttcaaaacatcttaaactcaagaccgagaaaaagattgggttacatgaccccaaaggaaaaatataaattattaactaacaatgaattcgacactgttgcattgtctgtttgaattcaggaatttgccatcaagggtatattgtaatattgttcttgaccgtttattatctatacctttgggctgtggcgtaccttttttactttcactaattttctttcgtgttaaaggattattcatattgcctgttttggtaacccaatgcaaatttacagctctattatcgtttttaatagcgtttatggggtcaatgtctggcttattacttgggttgggaataaaagctaatgctactaatcgatgaatggcttttcgcttatattttttgttcttgtataaacaaacgtatgtataactatgtatttttaatggttttaagatatgttctttcatcaaccaatctaccgaaccgttaaagcaatatttaggtaatgcctttactctacctaaatttgatacttggtataatccttcatacccttcaatgtctttccaaatttcgtccatgattatttcattttaaaagtgagtaatagaggcagcctttaaagtcgtgcgagccgcctttgtataatcgtgttaagaattatactgcaagcatatcaatacatgcagcatgatgattcacgcccttataatgctgagagaactctctaaattggtctaacaaccccatttgtatgataaaagaatataattcattcttagcttctttctcaatatcaaaccgcttttgtacttcatttaaaaagtcactgaatactggtgttgaatgtgtatttgaacattcaatctcaactgttaccatacttttctttttcatagtcatgcaattttaataaggttacacttcttgaaacatctgtattcttctttttctgtgtcccagtacacttgcagattatcattcggctttctgcctgtgcctttcacttcaccgataaagttttctttgagagtgccaaaagcttgacgtagcgtgccatctgtctttttaaagaagaactctactatctttactttcaaagccgctttcagtttcaaattagtccatgcgcattttaatgcctcactcattgaataaccattcttgcgaacgaactgccaagccatttgcataacctctttcatctgacttctaaattttgtgctcatactacttatatgttttaaattatactacttcgtttaatttgatattgcaaagtaaaactagctagtttaattttgcaatatttaaagtaataaataatgttaaaaataaaactaagtagatttattttagccatataattgtattatgtggtataaatatctaattttgtcgaataaaactatatagtattatggactttagaacaaggataaaagaactttgtcaagggcaaggtataactcaaaaagagttagcagaaaaaatgggaatatctgatataagtctgaataagactttacgaggggaatatccgcagttgcaaacattagaaaagattgcgaatacattaaatgttcctattgccgaactatttgaaaagccgaatgccagtaatattatcggcttcgtaaaggtcggagataccgtgcatgaagtaaagtctgcggaggatgtgaagaatttagctggaaaattgtaacaaattaaatattaaagatatgaaatgtccacattgtcaggtagaagtaaatgtagatttctcagaaaaatacataggaaaatatggaaatattttttatagtctattctatatgagatgtccaaatagtgaatgtgataagcctattgtacttttgggacaggcaaacaatgctaatcaataccgtgacggtacaatatctataaaagaacaacattcctgtaattttaaacaactattccctgtaggaagcggtagaatgcctgctgctcctgaagttgaatctaagtttgctgaagattataatgaagcctgtttggtacttccatttagccccaaagcaagcgcagccttaagtcgtagatgcttacagaatataatccgtctgaaagaaggtattaaagaaggaaatctcaaaacggagattgagaagctaatagcaactaataaacttccatcatacataagcgacaacttggaaataatacgtggttttggtaatattgctgctcatggaatggaagaccgagcttctggtgaaatattagatgtagaacctaatgaagcagagttcttattggacgttttggaacttctttttgatttgtattttgttcaagctgctaaagcagccaagatgaaagctgcattaaatcaaaaactgacaagcgcaggacaaaagcctataccataagtcgcatagaagaggagcttgcagaaatcaaggaggaacaaggggcaaagaatgagcaaatcggaaataaggaacagaaaaacgtttcttagccagaaaaattacgggatttataattttgtaacaagagaaatagaataattagtggtgactctttggagttgccgctatttttttgctctttaaattgtaaatattagaatataattttgaattatagaattatatatgtatttttgtcacacgataattgagtaaccaatgagaatatttaccgaacaagcattaaaagaatatgcagagaaccatcccgattcaaaggtcgctttgcaagaatggactactattgtgaaaagaagtaagtggacctgttttgctgatattaagaaaacgtttaatagcgttgataatgtaggtaatcaacactatgttttcaatatcaaaggcaacaactatcgtttggtagtagtgattaaattcactattcagtttgtgtatattcgctttattggtactcataaagaatacgatagaatagattgcgctaatatttaggattatgacaaagatagaaaatcaagcccaatatgaatgggcggtgaaaagagtagaggaacttcttccattggtgaaagatgatactcctttgaatgacccaaatagcatagaattggagcttctttctaatttggttgctgattattccgaagaacattttgcattgggagaaccaacacttgtggaggttcttaaacttcgtatgtacgaaatggggcttaatcaaaaatcacttgcaaagttggttggtgtcagcccatcacgattaagtgattatatatctggtaaatgtgaaccaaccttgaaagttgctcgtgagataagccggaagctaaatattgatgcaaatatagtgttgggagtgtaaactctaaatctacgataaggttactatggaaaagaaatatcaagtatttgttagttcaacgtatgaggacttacaggaagagcgaaaaaaagtaatggaggcacttttgcaaatgaattgctttcctgtaggaatggagtattttaatgcttcggattcatcacaatgggaggttattgaaagtcttatacgtgagtgtgactattatgttttgattgttgctggacgttatggatcaatagaggaagaatcagggaaaagctatacgcaaaaagagtttgaatatgcaattgaacaaggagttccggtcatatcgtttgtacataaagctcctgaatctttacctggtattaaaattgagcaagaacaaatcaaacgtgataaattggaagagtttaagtcttgtgttaaaaagaagttatgcaagttttggatcaatgctgatgaattggcatctcaagttgtattaagtttgaattctttgattaagactaattctcgtattggttgggtaaaagcggatgaaatatcttcggctgaagctaataaggaattattaaaattgaaagaggaaaatacaaaactgaagcaacagattgattttctatcttcaaagattccggttggtactgaattatattgccaaggagaagataagtttgcgattgagtatatttatgatttagaagatttatatccaaatgaagtgaataagacctattcgcatgaaactacttggaatgaaatttttaaaaatatatgtcttcgattggttagtgggcttgatactcggactatgaaaaacctattgagtgaaggtttattaggtgaagattgtagcataactaaacgaagttttgatacaatatgtattcaattgggtgcattgaaattaatagagtataaaaatggattatacactttgtcaacgtatggttacaatgaaatggttcgactattagctttaaaaaagtaatagttattttatagatataggtgtgattcaattcggtttcacgcttttctttatgctttaacttttaccaatttcaattttgttccatacttatcgttatggcgtgacggttgtcacgccttttttgttagtttacgacaatcaacccattgtcgtgtatcgtttatcagattatttcacaatcacttcatttatagcgaaatttaccgtagaataaattttaattcatacggtatgacaatcttagaacaaattttggcaggactacaacaaaaattcactggggtggacactgctatcttaacccgaattgccaccaaaaaagcagagggtgtaacggacgagacaaaggtaaactcaattgttgagggtatcagcttttcggacgtgttaaattcctatggtgatttccgtgctggggatgcttcaaaaacggcagttactaactacgaaaagaagcatggactgaaagaaggaaagccaatcgagaaccctaatcccaagccgaaaccggaagaaaagctggacgacatggctaccatcattgccaacgcagtgagtgcagccgttaaacctctctctgatgaacttgcccagttcaaggcagagaagtcgcaggctacccgtcaagagcaaattttggcaaaggcaaaggagtatggtattcccgaaaactacgccaaacgatgcgccattaaggacgatgaggacttggacgcatactttaaggacttgaagcaggagttcgcaaatgacggcttcaaaggcgtgatccctcccgaatcatcggaagagaagattgagaaagaatctgaatctatcgctaagatgattgacgagggaacgaaaactattgttgaacaaaacaagaattaattatgtcagcaggatttaagtatgatttggttccgctcgttgagcaagaggaacgctacgatgtccagaccggtattcgtagacgtggcccgttcaaactcgacacgcagaacctagtagtgggaagtttccttcccgtatttacgccgatttgtgcggacttgaaaaacaagttcgcttatgcggtaatcaacgtgagagttgtggaagcctataccaccggtgtggaggatttgtctatcaaggtagccaagaactctttggcatacgtgggcatgtttgtcggaagtggcactaaaggtgctgaggtcgtggctattgacaagtctaatgccaattacgatgtcttgactatcaaagctgctttcggtgagaatatcgccaaagatgccgtacttttcaatgcggttgcggttgacggcttgaaacagaagcatgtagcaaattcagctctgtttaaccgtacaaaggttgaggacgggattacgctggtttcattgcttcgtacagccgcagagattgagccttcaaaactggttatgccgttctccgagaacgataaagccaacatgaagggatggtttgaatttaacgagtaaggaggtaggatatgtttttaacgattcaaacattattcgatgatgcgaacattgtttccgctatcatcagacgtgtgaaccagacacgcaaggacacaatctattggcagcagtatcttactttccgcagggtaactacccgcgtgttcaaagattatatcggttctgtaaccggagttatggccggttctatcaattcacgttttggagagaaacccatccgtgaacgtcggaacatcggttccggatatggtgagattgcctatttgggtgatgcttatcagatgtctatcgaccgtctttctgaattgcaggatttgattgacaagttcaatgcagctaaaccggcagaccaaaaagctgcaatggaagagattgtaaatttcctagcggatgattaccgtcagattacccttgctgctcacaagcgtatggatattattctcggtgcgctgttgatgcttggtgaagccaccgtttacaacaaagacgctgcaatcacttccggtcagaccaataataaactgctggagattacccttccgttcaattttatcaagccgaaaagtggagatgtggttgtggacggaaagaatatgtttatctcttatttgagagagaaacttcattccttggcaccggactatggcgtttatgccaagatggttatgactcgtgcatctttcaacaagtttattcttggttcatctgaatttggcgagcaatataagatgattctcggcactaacgaaatgaagttgagcacgggattggtttcctcttctttggcttccgaagtgttcacaggtatcggcctgccacgtattgaaatcaaggaggactatgtgaaagaccagacgggaaagaacgtgcagatttacgcggacaaccgtatcactctgttaccttccgaccaaattggttatatgcgccaccataccccgtatgaagcgaccgaccccgttcaggggcgtacttacgttccgtcagaggggcagatgcttatctccaactaccgcgacaagaacggccgctacatggaatatacggcagagtggattccgcagattagtaacccggatttgattaccaatttcgatttgagcgagattgcatccatccaatcagcataaggaggtaggatatgaaagtaaaggttatatcagttttccgcgacaagttcaccggaaagtattatactcccggcgaagtgattgaagtcggcgaggaagctcgtgtgctggatatggaaagccgcaggcttgccgaacgggttgaagcaaaacttcccgaagtgaaagctcctgaagaaaagaaggaggtgaaaatctccctctttgaaaataagttcgagaaaaagactttggctgacgctttgaagtccatcggcgtgcaggcttccggtaacatgaaagaggaaactcttttgggtaaggttgcagagctggacgaagaaatgacttccaaactaaaaggagcattaggaattgagtaaacggacagggtagttcaccctacctttccattgtataatttaataaatcggtaaaaaatgaagaattttatttttgccatgtgtggctttttgatgatgtctttggtttcgttgggcgtacaggcatcaagtgtggaatctcccaagtgtgaatacgtgaatccatcggttgatgttggtttacccgatattcagtttgtcacttttgaagcatctcctgttgattgtgttgtgctgaccatgccacagattatgttcttggttgcaaataatccagctatgatgtgttcgatgaaagaggaaacggctattcaaggaaaacaaatttcagtccctaaatgtccgttccgatacgtgttcaagtcgaaatatttgacccattacagctataccgcatatagtaaactgattacaccctgctaacatgacggtaaacgaatacatatcacagaagttccagtctttcggcattaacttgtcggaagctgaccttttctatatgtgtctgaacacgaagataagcggagaggatgagatgagcgaggattactacggtcgtgtctccgtggcgattgcgaagtttatcccctctctattgcttcgtgctacttcaatcagtgaaagtggtttctcgatgtcttggaacattcaaggtatcaaggactattattcatggctgtgcaagcagtacggattgaaagacgagttaagtaacaaacccaaagtaaccttcttatgatattcgctccccacatattgcaggtaaaggttatcacccctatggaaaaggacgagtttggcagacccattcccggaactggcgatgaaagctggcaggatgtatgtaagtgccgttgtgatgataacacaaccaaagagttttcatccgataatggctctgtgtatcgtcctaactatcatgtggtgtgtgagaagagaatcaccattaagacaggtgatgcagtccgctgcatggacggtgaaaatatgagaggtcaaggcgaggtttacacggtgaagagtacgaaccactttaactactcggagttatggatgtagatttcgatttctcagatgtcgactcctttttcgatgaaggagaatgggaggtcgaaaagaagatgattgatgtgggggatgaagccgtgaagtacgcagaggaacatggggattatcaagaccatacactcactttgagaacgtccaatgattacgatgtcgataaagacggtttgacattgaaaaacgaagcggaatacgcatcattcgtagaatctaaagggtatgatgttttgagtagtgctgctttatatgcggagaaacgattaaaagaagaatttgaaaaatgaaaaagtacattggaacaaaacagattgaagcagaacctatgacattgggtgaagcttgcagtaaaggcttggtaaaaagtgaaatagaagagaatgagtcttataaactaggatatcacactcgtactgaatatggctatgaaagttggtcacccaaagaactgtttgaagaatcatatcgagaagtcaaggaagaaattcctatctgtttcggtgatgctatagaagttttgaaacaaggtggcgctatccgtagaaagggctggaacgggaaaggattaatggtattcaaacaggttccagctcatatagagagtgatgttattccaaagatgcaatctcttccgcaatcagcaaaagaccttattctgaaaggcaaaggtttcattgactatacgagtcaatgccttatttacaacgagaacaccgggcgtgctgattcatgggttccgtctattagcgatgtatttgccgaagattgggagattgtagagtgatagtaactaccgacataggaaacattctctaccgggattgtaaagctttcgggatagatatagtaccggacggggaaactctgaaaggtgaattaaagtccgaaagaatcgttatccacacgaagaaacaacagccgggaaagtattggaaaaaatctttcgtagaagtgaatctatgtgtacccgatttgagtgagaatgaggcaaacaccatacgccttaacgagcttgaaaggcaagctgtgaaactatttgacgatgtagtaagtacctatgacggtacaacctatcgttactctatcgaatcaattggcacggaagcggatacagctttgaaatgtcattatgtgaatgtaagaattttatttgaagtaataaatgtaaaattataagattatgatttcagcagtaggaataaaaagaatcttgtttgccgatattgataaggtaacggcagacattacccccgaaatcgcaaagactttgattcaagccgctatcaaagcgaaagatgaggttttgaacgtacatggggaaacgtggcagattgaggaaacggaagcctctgtcaccgggtacaagaaccaattaacaggaaagaattaccgttacgatgatgtgccgggagaagtatcacccactttctctatcggacaatatgactggaagacaaagaaagcgttcatggggggcgatgttattcaggcaacatctaaagatgtgggttggaagcgtgctttggataaagtggtcattaacaaagcattgttctgtctgaccgatgatgatgtctggttcatcttcccaaaatgccgtattgtttcccgtgaagccaatacggataaggcaattgcaatcgctgtaaaaggcttggtgcaggaaccgggaattgaaggtgtatcttctgaatataactatgaagaagggcagattaaagctttgcaggcatgaactacagtaaccattgtacctactccttccgatgcaaccgtaaagctggacggtgtaacggtcaagtcaaagcaggtgaatgctggggctaccgttcactatgaagtgtcgaaagtggggtacgtcactcagtcaggagatattaaaaccactccttctgaagttgataccactcttaaaaaagagataacattggtaaaagcataagagtgataaccgggggatggatatataccattcccccttttagtttaagaatatgaatcaagcagcaaaaacagtttctgatgctttgttagggctggatttcatgaatgtggagataggagggatggtttataccattaaacctcctacaattaaaattatctgtcgtgccattcatcatttttccaatatcgccctgcgaggagataatatcatggaggctattaaagagcttcctgaagctactgaagatatgctgaaaggtatttcatgcttcatctgcgggaatgatagtttggtcaaagaattggagaacggcacttttgaagaagtcaaagatgccttggaagtctgtttctctatgatggatatttcggcttttcagtgtgtcagctcgatgaggaacgtgtcgatgctggcagcaagaccgaaacagtaggaaacacaacgttcttcgggcagatagcccatttgattgacacgcttcatttgagttatacagaagtgtttgaggttatcccttataggaatctgttgatgatgcaacgggataaacttcataccgtaagtggtcaaaaggtgaatagaatcagcggtaaggaattagctaatcgtaggaaaaagaaatagatatggcgaaattatattgtttaacttttaaaattttaagctgaatcaaaagaagaaaaagtttagatgatttatcggcacagagatggagattagcgcagactaacatttctgatgcaagaatgaagagagttaatgccgcatatcggaagtatgctggcaatattcattctcgtgtaggtaatttcggtgaattaaccgacagacagtacgcccgtaagttctcgcgtaggtcttatgtggggctgaatggtgagtaaagaaaaagccggagaaatccggctttaactaaataactttatcatgagtaggatcgtaagtcatttctctattcttttggcactataaaatattttgtgtaaatggaaatacgggattcagaaatgagtctcgtattttttattttatacatttgcaaaatgaagaagcttatgaaagaaaagaatcaagtagtgcctgatgaggttttaagcaagtttatcagtcagttcaagacagaagccgatgtgagcaagtttctgaagcagttgcatgcccaagtattggaaaagatgcttgaaggtgaaatggatgcccatttgggatatgaaaagaattctgtgataggaaataacactggcaactcccgaaatggcagttatccgaagaaaatccaaaccgaacatggagagtctgtcatttctattccacgtgaccgtaacggccagtttgagccgatagcagtgcctaaacatgaaagccgtggactttctatagaaaagctcgttatctccctatatgccaaaggaatgagcgtttctgacatagaggaagagatgcgtgagatttatgaaatagagctctctacatctgccatttccatcattaccaacaaggtcaatcaggctgcccaggagtggcagaaccgtccccttgatcctgtttacctgatagtctggatggatggtattgtcttcaaggtacgggataacggtaagatcataaacaagaccgtttacctttgcgtcggactgaaacagaacggtctgaaggaagtccttggcatgtgggttggcaaatcggaaagctcttctttctggatgggtgtcctgactgatttaaaagcccgtggggtgcaggatatcctgattacctgtactgacaatctgaatggatttacggatactatccgcagtatattccctcagtcatccactcaaatctgtgtggtacatcagatcagaaactcctgtaaatatgtggtttataaagataagaaagagtttacggcagatatgaagaatatctataatgcacccaacaaagaggttgcagccacagaacttgacaatctggaaaagaaatggggaggaaagtatccttatgctatactttcatggagaaacaactgggatgatttgactgttttcttccagttcccgctggaaatcagaaaaataatctacacaaccaatctcattgaaaacctgaacggaaaaatcagaaagtacacgaaatcaaagctttcattcccttcggatgatgcagtcaaaaagaccgtttatctttcacttatggagattgagaagaaatggacacagccgattcataactggggcttgattatgaatcaatttatgcttatttttgaaaacagaatccagatataagaacaaacttacagctgaatcctgtttccatttacacaaaattttggacagtgtcattctttttttctatacgaaaatcttttatttttgatgaaagtgatttttctagagtttgttttgctttgcggtacgtaccatcgtttgatggatgccgcgaactaacaatagctcctataacttttttatcttttaaatacccttgattgtagaataagttcactgtattgccaatttgcgttacagcatgtgctatatctgttccctttagttctacaaaaatataaatacaattggaaggcgaagttggtgtatatacaaataaatagtcacactttctatgtttcgatgaactgtcaaaataaccgtcaatttttattttgtcaacttcagaaacctgcttagatacaatagtgaatttacttttattctcgccaacagtgaaacgtgaagtacatctacatttagataacttatatttgtcatcaaaagatgtagtgtccgtaaattgagtttttctttcaaagcatttacaacccatctctttcgatattacaaagttcatcaaaaatatgtcctagttcgttggacgcttcgtcaatatattctgcgcctaaagatttaatgtcagtatctcttatgtctttaacagttccatttgaatgaaagaaataagaagatacatcatcaaaatcaatcagagccattgagggaatgagttcttttattttaggtaaaacaagttttttgttgttgcttttctttaatacttcttgtgcaaatattaaattatctactactgataatacataagggctgtgtgttgtaatcacaatacttccatttgactttctcatttttctcataatccaatcaattaggaaatgttgagtagaagggaataaatttaattctggttcttctataactaacatttgttttttcttgctttcaacatactgattaaatacagtccataggggaatgattgattgaattccacttgaagcttgggataactttaattccttatgctcatttgttaaatatatagtatcgccattattattaaaagatacttgaatatttagtatgtctatatcaatatttttgtattgcattctagctttttcatataaacttccaaaatcctttatacaatcaggaatactagctcctgcctgtaataaagagaatatgctattagaaaatgttgaaattaacaatctttcagctggtatgtatacaggaatacactcttcataaatgacgctcatcaaaagtggcttaatgaagtttgagaaaaatgcattttctttctttagcttatcgtcttttatggaattttttagagcatctattaaatcttttaatgacgattcactttcttttttttctataaattttaatatgaaatcataggactcagatgtgttagccatctccatgagatctgcatctttataattactatggaatttatttaattctatttcccaaatgtatttttcattacgatattgaatttttgtggatgaatcgaatgaaaaatttatattgtatttttctaataagttggtgaatgctttaaagtttccttctttgatagcccaaaatatagaattgttgaatattgcgataagctttgcaattgtactctttccacttgatgtatgaccgataaaaaaattatatttttttatttcaatatcagcagattttatagctccgaaatttattacttttagatgtgccattttaatgattttgagtcgtttcttaaaaataagaaaatattcagcagcaaatatagctataaaattatagttataacaaataatgccttcttattctcattgaacaaagagattatgagtaaagttctggattttggttttataatttttccgctaacttcttaatatcatccttactattgataacgtgagtgctatctcctatgcgaacagctcctataacttcatcggaagatttttcaaaaaggtctgaaacttgaacattcaaagcagatgctattcgttctaatacttctactgaaggattgccatttatgtgttgacttaatcctactctggatattcccatcttatcagcaagctcttgaacagttgttccttgctcttttataacttcttttattcgtaaagccataactattctaaattatattttgtgcaaatatacatacttttaaatatgtaaaacgatagctattcttaaattgagttaatgtaaagcgaaatatttctattttgtttgattatttaaagtgaacggtttacatttgcatcgtggttataaaacgatagatatatgaaacgctacaacttatctcaaataatgaaagacgctcaccgcttctacaatagccgttcaagaatgggcagaacttttggcgaatgcctgaaactcgcttggcgttgggcgaaagacgctatcaagtttgcagaagaaagagaagttaagataaaggctatgttagccaaccagaagccggtagagcgtacatcttacaatgatagtaagattacttggtctgactgctacaattcaaatagccgtgggtatatgggttctcaatattgtggtgattaaagtcagagcaaagtagaaatgaaataactcaaaatataaagattatggaaacaatagaactaagagaaagcgatatgtgcagagctaagaatctcaatcgcaaaaacggttacggcttggatagcaaacagatgatgcaccttattaacaatcataagaaaggtgatgcgtacaagcgtgctttgatagagtttcgcttgactgatataaactttcatcgtgaagtcgaaatgctaatgaacggcaagtatgatgaattgaaaaaacaagtaaaacagtggtaagcaaagaacgcaccaccttcacaggcaacgcgctcgaaatagtataaacacataaatataacgaatatgagaacagaaattattaaaatggaaaattcttcttcatgtgaaattgatttgattgaagtaagagatggacaagcggtaacctcttcattggtggttgccaagtattttggcaaagcacataaagatgtattaagggctattaaatcattggattgtagtgagttatttaaccagcgcaattttgcgcccgttgaatatgtcgataaaaaaggtgaaaaaagacccatgtactatttaactcgtgatgggttcacctttttggctatggggttcactggcagggtggctgcacaattcaaagaagcgtacattaacgcctttaacgaaatggaagaaatgctccgcaagaatgattgcaccaagtatgctgaaaagatattcaaatccgaactgaattgtttcaataaacggttgaaagaaacagcagcaaaaataagaagagagaatggggtcggatttggtatttatggtgagatacaggcaggcgtatatgattgcgacaaattgcctttccaagaaagattgcgcaatatatttgcccaaataagcaatgcctatgtagaaagttattatttggcaggacactatataaacgctgataatcaaaacaagcagatacgcaagttgatttctgattttgaagggaaactggtagagggatttagaatatatccaagcatataaatacgattatgaacttcaaaacaagaccaccgccaataattgctaccaaatgagagattaaaaacatagttataaatcaaaaacaacaagaaaatgagtaaacgatttgctatcgccattttacccaaagagaaacagcaggggggggtaaagtacggtttaaagattgaaaaaccttcagcattgggtaatgtgtatggattgaccgaagaagagctgaaagaacttcgtggattgatagacaatgtattgactaaataagtatgaaacatatgaaaacgagaccaccaccaaaaacttcacgacaatgaaacgattgtcgtgttatggtaaaataaaaatctctctcttacacgattatataataagtttgcaaacagaaacaacgcagctatcctcacagctgaaaatataaccccgccattggtaagaagtgaggagcttgcctttggtggggtctaattttttaaactgtgtaaaagtatgaataatattcagattttccaaaatgagcagttcggaaaagtaagaatcgcgatgaatgagagtaatgagcctttgttttgtttggcagatgttgcaaaagcccttgggtatagcagacctgccgatgctgtaaatcaacactgtaaaggggtcgttattttgccgacccccacaaatggcggtgtacaagacataaagtacggcaaggaaagcgaggtttatcgtttgactatgaaatctaaattgccggatgccgaaaagttccaagattgggtttgcgatgaagttttgccctcaatccgcaaacatggtgcatacatgaccagcgatacacttgaaaaggctttgacctcacccgattttctgattcagcttgcaaccaacttaaaagaagaaaaacagaagcgtatcgaagccgaacagaagattcagaaagatgcacctaaagtcctttttgccgatgccgtttcaacttctcaacgttcttgcttggttgctgaattagcaaagatactgcaacaaaatggagtgaatatcggtcagaaccgtttgtttagctggatgcgcgagaatggttatctttgccaaaagggtgactactacaatcagccaacgcagaaagctatgaaattggggctttttgaattgaagaaaaccaccatcaccaagccggacggctctgtattggtcactactactaccaaagtgactggtaaggggcaaatttacttcgtagaaaagttcttaggtaaagatgctgcttaaataataatgcgcacctcgttaagtcggggtgcgctattagttacttgggaataactgatataaaattccaaataggattatttgatatagaaataatcattcctttttcagaaatcagttcatttaattttttattattttcatcactaaaagagtcttctctatttaatatagacatttcttgtttgcagatagatttgaacctctgaaacatgatgaaatctgcaatattgacagctataaataccgccaatattgtgataactgcatactttatcctttttttcatattgtataattgttttagtgacaaaactaccccaaaaacatattccgtcaaactttctcacgacaattcttccattgtcgttcttttgcaatctctgaaatagcaaaataagtttccaatatttaccttcacaattattttaccacaatagcccgattgttgcatatttcactgaaaataatcatcttaaaatttggctatgccgtaactttaacaagaaaaatggactttaaaggagatatttcaggattggaagaacttatccggcaagcggaagatgagtattactcaaaacttattgagataggtaagaattgcattcgcattgcgcaaaacgctcgtggtagtaatggattgaaagaatatcagaatcatactttcaacttgcgtaatgctccgggggcttgcgttgtgaaagatgggcaaataatatggatggaagtagtagctgacacttcacatcctgaagcgaaaagcgaaacggaaaatctactaatctattcagagaagccaaaagacgggctttatttggcggatggtatgccttatgcttcattcgttcgttcaaaagggtatgatgtattagattcagcaatattatatgcaggtagacaaatagaaaaaaaattatagatatggcaggcattatttcaaatgtagacagtgatgttcagaagttgcgcaaactgaagaacgagatagaaaatgtcaaaaaagcattgatgggtattaatattaaagtggatattgatatagcgaaaggattgcaatcacaacttacctctttgcttgggcaatatgatgtattggtggataagattgcggcagcggaaggaaagattatgctttctgtcagtcgaatcaataaagcaaccgaaaagattgtcaaagcacaagaggttgtatctaaacctacggctgatccggcacagaatggagatgctgcaaggcaaacaaatacggctgaaacggaaagtgttcgggcgcaagcaaaggcttatgatgatttaaaaaccgaaataaacggcattcttggcacaagagaagagaacatcaaacgaatggtagaggaaatgaacgctatccgtttgattaatgccgaaatcaaaaagataacaaagtcgcaaggtgagtattcttctttgtcctctgcgcaaagaaaacggcttgaacaactgaacaactccctgctgacacataaggaggctttggcagaggtacggcaaactctgaacaataatgtcaagttggataatgttgccgccacttctatgaaaggactgtcgcagtctttgtcaaggatgagaattgcttatcgtgaactgacggaagaagagcgtaattctccttttggaaaagaactccttgcttctatcaatcaggctgatgcaaaaattaaggagcttgatgcgacaataggcaaccaccaacgcaatgtaggtaattatggcaagcagtggaacggacttagtatgtctatccaacaagtaggacgcgaacttccttctttggcttacggtccgaaagtgtttttttctgccatttctaacaaccttccaattttagccgatgaaattaagcgtgcacgtatcgaatatgatttgttgaaaaaatcggggcagtctgctactccggtgtggaaacaggttgcctcttctttattctcatggcagactgcattaacggttggtattacattgcttactctttatggcgataaggtggtggattgggttgcagggctgtttaatgctaagaatgtcatgaaatctcttgttgatattcaacaacaactaaatgacgttcaattaaaaggagttcaaaatgctcaatccgaaataacaaagttggaattattatataaagctactcaaaatgcttcaaagcctattcgtgaaagaaaaaaagctgttgatgagctacaaaaatcatatcctgatttcttcaaaaatctttcagaagaagaaattctaacgggaaaggcagctgacgcttatgcaagacttacttcttcgattattgcatctgcacgtgcgagggctgcacaggataaaatgacagagaatgctaaaaaaatattggaaaatgaggctaaaataacagaagaatatgctaaaagagaaaatgcacaactaaaacttgacaaacagattgaattaagaaataaaatagacagagaggcgaatcccgatatgtatgcaggtcaacaaatgatggttggtgcagctttgggtaaggtcgaagaaatagatgaaggcattgctaaacttagacgtgaaatatacgagctaaataaatctcaaaatgaattagcacaaaacatagatgttaatgatttgatattcaacccgaatggagattcttcaaagattggtgaagaagaaaggaaaagacgtcaagaagaagcagagaaattattgaaacaacaagaacagcttttcgaggaacttctccaactccgtttcaaaaaccagcaagatgaaatcaacctgatgagagaaggcacggaaaagaagttgaaacagattgaccttgattatcagaaacagattgatgcgataagaaaacaggaagaagaatggagcaaagccggtaacggtaagctgaccgacaagcaggcacagaaaatttcagaagcttataccaatgccgaaagtatgagagataaagatatttccgatgtaactgaaggacagctgaaagccgaacaacaggctttgaacgactacttgaaagaatatggcacgttccagcagcagaaattggctatcgcccaagagtatgcggaaaaaataaggaaagcacaggaagaaaacggtgttaatagtgcacaagtaaagttactggagaaacaacgtgatgttgccatacagaacaaggaaacagaagccataaaagccaatatagattgggttactgtgttcggtgagtttggttccatgttttccgacatgataaagcccgccttggacgaagcgaaaaaatatgtacggactgacaagttcaagaactccgatcaggcaagccagaaatcattgattgacgccatcagccagatggaaaagtctttgggtggtacaagtggagtcaacttcaagaaacttggagaggatgtaaaagcctatcatacagccgaacaaaaccgtatcaatgccatagagattgaaacagccgctttggaaaaactaaagaaatcacaggatgattacgccaaagcacagaagagtggaacagaagaagaaaagcaggttacagcgaatgcccttgatatagcacgacagaatgctgacattgcatccgccaatgtaaagacacagacggatatcgccaatcaggcccagcgtaatgtgactgataccgccaccagactgaaagcaagcatggaaaatttgttgggaggcttgcagcagatttcatccggtggattatataacgcgtatagcggaattatcaaaaccgtgaacggattcaaggatgtcataggaaaaacgtcagaatctcttaaggaggtccccattgtcggatggattctgtccatcattgacgtactcaaagacggattgagtgatcttgtcggtggtctgcttgatgctgttctgaacgcggtcagtggaattatcggtgatgtcttgtcaggggatttgtttgtcacaatcggcaggtcattgagggacggcataggaaacatcctgaacgcgatctcattcggaggcttcaactccctgtttggaataggtggaaacgccaaggaagtacaggaaacgatagacaggctgacgaacaggaatgaaactttgcaaacggccatcgaggatctgactgacgagatgaaggcaagcaggggaatgaaatcggttgaatcttacaaggaagctgtaaagtatcaggaggaagtcaataaaaactatctgcaaatagcaaaggagcaagccggatatcataagagccacggcagttggcagcattatctgaaatggacggatgaaatgctggaacacgcaagaaaagctaccggtatgcaggatttctccggcactgattccttgtggaatctgacccccgaacagatgaaggctctacggtcggacgtatggttatgggatatcatggaatcttccggtaagggaggttacggtgagcgtgttaccgacaagctggatgattatatagagcaggcaggaaaactggaagaactgaccgacagtctttatgagggcttgatcggaatgtcattcgattccatgtatgacagttttgtaagcagtctgatggatatggagaagagtgcggaggattttgctgatgacatatccaaatatttcatgcaagcgatgctgtcaaatgccatcggtgaacggtttagtgacaaactgagggcatggtatgataaattcggtgaagccatgaaggatgatggtacgcttgacaataatgagcgtaaggagctgatggatgaatacatgggttatgtggacgaagccatgaagctccgtgacgaacttgccgcagcaaccggatatgataagatttcgcaagaatcaacatcccagttagcttcatccaaaggttttcaggaaatgagtcaagatactggcgaagagttgaacggtaggtttacagcattgcagattgcaggagaagaaataaagaatcagaatattattcaatctcaatcacttaatctactaacagtaaaagcagatgctctactttccatagatacggaaacaagaaatattgctgatgatacgcgggatttgatagcgcaatcctatcttgaattggtacagatttcagaaaatacaggggcaatcgtcaaacctattcaacagatgcaaagagatatagcagaagttaaaaagaatacagcaaaattatagtctatggatgaattattaattaatggcgaaaacgcttatacaacatggggtgtgagaatgggagaggggtttcttgatgttattggggcatccgctcccatgaaggattttattgagaacaaaagccgacttgaacatgggaaacgggtaataatcaataatcctaaagtcgatgagagggaaataactctttcgttcactatcgagggtaattctcagtctgattatcaatcaaagaaaaaagctttcttcaatgagctttataaaggcaaggttgatattcaagtcccggctaatagtagcgagatttatcatctgatttatctcggtaaaagtatcacttacgcacagagtttagaccgaacttttggaaagatttcagccaagttcaacgagccaaatccgagcccggaagggcgaaagtagatgatagggtgtggataacacaccctatttagttcaaataataggtgtgggcaattgtaccataaagttattctataataggtttggcgaggaaatgacacaaaaagcgattcgcgagtgtcttataacaaaagataagactttattgtatgtgcggaataaaaggaaataattcggccaacagaacttaattcacgacattggttttattgtcgtgtatgtgagtgctcaaaattgggcactcttttttttatccccgaactttgaagacatggaacaaatcgacatcaaagacatatccggtgctatccagcttacaactttgatcaatgaaggctgcaagcgtaagttcactctgatgaaggaggactacatcatgttaaagttctccttggataatcccatatatttcaaacttggctcatacgtggaatgtaacttcggattgttcgaggtgtgcgacttgcagaagcccgcattcaacaccaataccgccggctacgattacgaattaagacttgacgcctactactggaaatggaaaaacaaaatcttcaaatataccccggaaacggccggacaggaggcgtcctggaacctgaccgccccgcttgacgtacaagccggtatagtccttagaaatttgaaagctcttggttacacatacaaaggacaggattttgttttctccattgacagtacggtagagaacaaatcacaactgatgtcttatgagaacatcaacatccttgatgcctgttttgagatggcgaagaaatgggactgtgagtgctggataaccgagaatataatccatttcgggcgttgtgagtttggcgacgcggtggacttcgagatcgagaaaaacgtgcaggaaatgccacgatctgaatcccggtccacctatgcgacaagaatctatgctttcggctcgacaaagaacatcccttctaactaccgtccggttgatgagaccgtggttgtgaacggtgtggtgcagcgcaggctgatgttacccgaaggaaccccgtacatagacgcttatcccaatatgaccaccgaggaagccattgaacaggtggttatcttcgatgaagtctatccccgaagaacgggcaccatgtcggatgttactaccatcgaggtgacggacaaggtggagaatgaggacggcacaaccactgaggaaaaatggaatgcctaccgtttcagggatacaggtgttaacttttctgagaaatatatcctccccggtcaggagctgaggatacgtttcgcgtccgggcttctcaacggtctggagtttgccgtgaagttcaatcctgaaggaaagccggagaagctggaggacggcggctggaatcccgatgcacagttatgggagatagtcaggaatgaggactacggcagaccgcttcccggcgatgtgctctttccccaggatggagatgaatatgtactatccggctgggacagcacgaaaataaccgaactggggcttgtgggggctgcagaacaggaactgaaggtcaaaacggaaaaatacgcttccaaatcaaaggttgacccgagtacttacgactgcacgatgatgtccggtgacgcataccgcgaggacgacattcataacctctacagcattggtcaaaaggtcaaccttatcaacaaagcctatttcgataacggaaggaagtcaaggattattggatttgaattcaatcttgactatccctttgactcacctgtctatactgttggggaaaccgcctcctattctcgtatcggcgagctggaggagaaggttgagagccttaccctgaaaggacagacctatacgggcggtggtggcagcggcgtgtatgtgattggaagccacgactcaaccccggcgacagaccataacgtgtattccgcattacgctcgttgaaaacttttcttcgtaaagataaagaagatatcgccaatgagctgatcacttttttgaaaggtcttttgattggtaagaacggtagtggaattactgtactggaagatggtacctctcaagccgttgttgaccgcttgtatgtgaagattaaggctgtctttgacgagcttgaagtaaagaagaagacgcatgttggtggtgaacagatcatatctccggccggattgaagtgtgtccgtgtggaggaacttgatgagagctaccgttgtttctttttgtcggaagttgatggagtgacagtccataacgaatttacagtcggtacattagcattagcccaagaatttaacattaaagaaggaacatctcacaatgtatccaaccgctactactggcgtgaggtgacaggtgtaggatctgactatattgacctgagcaaaaccaatgccgacaaggacagtgatatcccggttgccggtgatgatattattggcttgggacacttgacggacatcactcgtcaggcagctataatcctttcttctgttaatgaaacttcgccttccattattttttaccaaggcatcaattctttcgcccttgccgggaaagaagtcatcgggctgggctttgacaagtccaccggacacgcctatatcaatgtgtatggtgatgcctatatcggtgccaaggatgagagcacttacatccgttatacacaaaaaggcggtgttgatatcaagggtatgttccatatcgagcagggttccaccggatggcgtaatatggaaggtctgccggatgagatacaggcggcggctgatcttgcccaagaggccaaggatgcgatagacaatgcggctgtcggaagtgtcaatctgttgcgtaattccgggtttacgggagattatgagacagaggacctgtctgccgctaccgagctatcggcggataccgaactttttagcaagcaactggaatattggacgggagtggctaccgtatctgcggacagtgatgccggctccgggtactctgctgcaatcggtagtttgtcccagtccgtatcattgattaaaggagaaagttatgttatcagttataaagcaaagggtacgtctgtgtctgtttcgtgcggttctttcagtgtttctcaacctctcacatcctcttatcagagatatacccataagatcaccttcaatggcagtggtatatttcttatcagtggtaccgcaaccgtttgtgatcttcagctagagcgtgggaccatcgccaccgattggaagccttcaattcttgataacgacaagtccatggccggttttcagtcaatcaattatatcgccagcgcgattaaggatggttctgtggacatccttggcggtttgatattggccaatatgatccagttaggcaactacaaggatggcaagatgcagaaggtcacagccggagttagcggcatatacaatgacgatgatgatgtggcattttgggcaggtggcacgttacaacaggctatattgaccgtgatgaggtttcgtaatgatccgaattatcaacccaccgatgaagaatgggcgaatatggcgaacttcgttgccactcatggtggcgatacgttcctgcgtggctatatttatgccttgggtggtaagttcagaggtgtggttgaagccttgggcggatttttccgcggaaaagtagaaacatctgttgacgggaaacgcattgtcattgatccggataaaaatactcttgaaatgtacacgactgaaggacatgccactttgatattaaggttcgacacatcatcggacggatgggaatatggtgatttgattttgcggaaatatgcaggggaccaattgatactagaaacgactgtatatccggaacgtatcagaatacagaatcatgtggaaaatacggatatcattcttaatcccaataacgtatccttctatggttctaaaggcgaaacgctgttagtcggaatgaaatcggtatataatggagtgggtgtgtataagcatgtggccaatattgattgcagtaattggccggggaaagatgatgtttcgtcaggtcaggtatatgtggaatatgagacagtagaaggagtcgtgacaaacgggactttaaaagtaaagaagtgatatggaactgaatagtattaacaagacaggtacttggagtgaggcggcagaccgtcttaacaacaactttagcaagacttctaccgaactagaaaaggtcaagcagaacggtatccgcaacaagggattattttctacttttaaattgctggaagaggctgttccatctcctgttataggtgactgggctgttgtgggggataccataccgggccctatatatgaatgcaagataaagggggcatggagtcctacaggcacgacaggaggtggcggaagtgttgacttgaacggatacctgacagccgaggagatagacgatgtaacatcaatattataagagttatgataagaattaattatcagtccgattttaaaatcatagagaagagcctgaatggagatataaatactcccttccggtttacttaccgcacagtcctgtcggggtgtgtcgttgcggagtttgacgggcacgggtacaagaactgccgcaggcttgatgatggtggtctgctggtcatttttgacaggcatggactacgtcccggtgctctgtcggtcaaacgcgaatactatctttccgatgctgattttgccgatggtatctgcaatcttgtatcggtggagaatacaggtgttatcctcgttgccggaaagacggatgagagcacggcggagatcatttcctatccggattatgccgcatacaatgcggtgcagagcgtccctctgtcagagagggagtatgatgatgtactgagtggttttgtacctcctctgccaccggaagaggaagaatgatttaatagttaaataaataattagttacataaaataataatcgcctaagttcccccggaacttaggcggatgaaaggagatattatggcaaaaatgcataaactaaccaagggtggacaaaccatattcccggctaccatctatgatgctgtggtcaatcccaagacacgcaagagcctgactacggaactttccgaactggaaagtataggtactgttaatgaagacactttaaactatgataatggcgtgataacattattatccggacacccttgctatatctttttgcgtaatgggaaaatgatcaaatatgaaccggagtcagacgaacattatgatatcgccaattatggagcactagtttatgatttgtctgataataagataaaagccgtagtgtataatgaaataaggagttctcataaggtattactgttcagaaattccaaagagcctaattttctcataggtggtcaatggtataacagctatctgcaaaggattatcaaagataagagggaacagctggagaataaagtggcagagctgcaggacgtaacgttcaaatttaataagataagcacctccggtgcacgtacgggcaggatatcctccatcgacggatcaattacagcaggtaatgaaagtctttatgtggagtttgatgtcacagaagcgaaatcagtccagttcgaggcttcaatatattccggaaattttggttatgccttttttaaagatgaaacatttctagaaggtgcaagaacagatgccaccggagttctgatagttataaaaccgtctggtgccactaaaatgagattgtcatggaacaaggctttcgtcactagacaggccataattactgatccttacagcatattgtcaattgacagtttgaagaatgaaattaacgacttcaagaaaagaattgaccgttgtgatgccgatatcacagatattaactccaatttttttataaagacggacgctttgctggtttatgacaacctcgtggatttggacagggttgagctgaagaggtatgtccgggcgaacggtgtggagggatcggctttcaactggtgtaggacggattatattccggtagaggaggggcagatatacacagcctttgactatgtgactacacatgtggctctatatgattcctcaaggaccatcaggacggatgtaacctggcaaagcggagagagtattccgtcaggagtggccttcatacggttgaatcaaagtttttcaagtacgacaaccgcagtaaaggaacttgtgagtttggcactgatcaaggggaaagcaactataaatcccggttttctacctgtcttaaactctgggaagatcaggctgcccggagaatatgtcacattcaacgacttgaaggaatataatgcgaggccttttgcgggaaaggggcttttttgtgctggagacagtcagacaacatacggacgatactttggagagttactaagggtcacaggtttgaaaatgataggtaatacgggcaaaatgggtaatggtggcacatccgtacaattgcccggttttttgaaacggatgggctcacaagggatgatcaagtgggatgaaataagtgtttttactattttggtaggggggaatgattatggaagcaatacagagaaaggttcattttctgacaatcccggggctaacactatttatggaggcatcaaaggtgtgatagactatgtgttgtcaaaacgaagcgacattgtcattgcagtctttaccaggccagaaagagataacgttgagaatatacacaacacctctgggtattggttcacaaccaagatactgaaaggtgttacccggatagaatatacgggaaatgtggaaccaagcagaggttgtacagatggaggagtggccatttccggatacaatgccgaaggggactttgtaagaaatctgctggaggcaaaaggcggctcctataatggggaaatgataaccgtgccgtcggattgtgccggagtcaggatatgctcaaaaggaagtggagccggagaggttttcgaattccggcttacgacagacggtacggatattgagaatggtctggtattgacggaagacactattgacggatacagagagaagtcatcctatgtattaccagagggatatctactgaacaacagctattataatatttatatctgggagaacggatattgcgacaacagaagctatcactacgctcccggtcccaatttacaaggtaatactatgtatgacataggtgaggcaatctgtgactgtgcaagaagaatgggagttccctgtctggatacgcataatttatgtaatgtggttcatggatataatctgcggaaactgatgcctgacggaacacattttgaacaggaacttgcatctaagataggacggttgatgggaaattttataaacactttatattaattgatatgatacgaaaattaatcaacagaataatgaatcatctgtccgttgaagtgcatccggatgcggaatggttctagaatgtaaaagggtgcactcttcaagagagtcatcctttaaatagtcgttgctttttaaaagcatttatgccaatagatataattttatgatcatatttcattatttgttatatgctttattaattttcaaataaagatgtacttttgtatctcaaaacttcttttagaaaagagggtaaatataattataaattagtatataatgataatatgaaatcagatcaacaacatacagaccgaagccgaacaaagaattccgttctttacaagtatcttgatattgaaggagcaaaaatgatgctttcaaatagaactctccagtttactaatgcgatgcaattcaacgatcctttcgactgcgatcccaatttaatagacttctctaaagtaccttctgaaaggtgtaaaacatggacatctaatattattgaatcgcttgcatttgaccaatatagaagaaaccgggaggacgtctggttatgctgcttgtcaaaagtctttgattcgttattgatgtgggcttattacaataatcatagaggggtttgtatcggcttgaatatggagaaagtggctaaatatttcgatgcatcacttggacagatagttgataaatatgctcatgaagtccaatatcgtgatattattgaaaaactggattacttccaaaacgaagaagatttctttcattatcaaatgtgcacaaaagctaaagtctgggaacatgaacaagaagcacgtatgtttattttcaatccttttccatggattatgttacctgacccaaataataaaagtgatctaatagacaggaaagaggtaagagcttttcctagaattggaggagaatgttttgaatccatatatttgggggtaaacattaacaaaaaagaaagtggattaatcaagattgctagaaaactaaatcctgatataaaagtgtaccaaatggaaaaaaacacgaatgcctttaaattagatgcaatcccatataaatgatgaataacaaatacagtcttccactttttgttgtttaagttgtaagaacgaaccaacaggctttaatctgctggttcgttcttacaactttccgagttactctactattatatgcccaataattttttagcattgtataaacttgaatacatatcataagtaaaattttgagtacctatacaaaaatcaacgaccttacaattctcaatttcagctctgtcagcatttggtattaaatctgaaaaagcgaaattagctacattctcattttcagatgaaatatttttgtacacttttactaattgatgattcaagtatatatatagtatttcatcttctacatacatttcccatagtatttttttattagccaaagaagcgtctggttcaatatctgaataaatttcaactatggttttatccttatattcataattccatcgaggactaccatcttctgctttatcataatctcctaattgtatagagaacacactactttttactatattggggagaagtacatgtaaaatccttctatgaaattgtgtttgcattccatctcttgaattctcatcaattataatcaatacaccataagtattctcattattattcacatctggcaatatcaacgtggatgcacaataagaacatcgctttttcataattaaagttaaataaaaagagtcttctatatctgatccatcaatgtatcctccttcttttataattatctgtggcattccgcctgcgaataaagtacctcctctacccaaatcataatttttgcctgactgatcttctcctacggatttatcagaaaatgtataaaatgccccatcgtcatattgatgaaagataatttctaaattcttcattttagaatttatctcttctattttattgtaatttttaacaatagcttcttgtggagaactttcttctttaattgcagaatagcatattccaattgtacttgtataataacattttaatgtcatatatgcgcaattggaaggtagtgaaaggtaacctcccaatgtgttcactttctcttcatttatcaaaatatcagaagtgttataataggaaacggtagcattccctattccatcgcccgatgatgtgaatatacatttattgaaatatagtgcatttattccgtctgttttaaaagtgtaagttctataaccacttgaagatgtataagtgggactgataaaatttaaaatagaatgttgatagttagatatatttccatttacttctttgactttttctatgatatttattttattaataattgcagaatatactatcggaatactagtcgaatgataaacttttactttcaagctggatgcttctttaggtttatataagtttcctccctcataaacacccgtatttattacaattttctccccaacaatatcatcattaacatcagaaaaattaatctctatacgtggaaatccatccggtgtaacaatcttatctataataatagcatcaacttctgatgataaattatatgtatatgttctatacccactagaagatatgtatgtactttctaatttattcgatggaataaaatcatcataaactttgtccagcttatctgctaatttgacatcatactcatcttttaattgttccgatatgttatcaagacttgtcggattgaatataatatacacagaagacaaaggaacggtgctaaagttcgaaatccctattttttttgcaccgttagggatttctttttttaaaggcgcattattgtcattttgaaaatacgataacacgccgccatcttggttaaaaaaaacacaaaaaagcggactcaacgatctgacatttgttaatacatatttatccgtttctattaaatctaataatgcgtgatgttgaccagaagcgattgatccatcagagttgtaataaccatcttcccatattatattacttatgttcctattatatgcgccatcattgtttagatatgatattgatttagaaatagaatccaagttatcatttaatgatacaatttgcaattctatttgttcgttactttttactaaatcagtaccatcccatgtatacaattcattgttatattcataaatagcaccatccacgaacggaattgttgaaactctatcttccgtttctttttttaccaatattttactgcttgttgaataaccaatttgcccaacttccaacaagttacttaccgatgatgaaaaagcgtatagtttaattagtttataacctaattcggaaagttccgctgtaagattcttgcgtgttttggggttgaccaccgcatcatagatggtagccgggaatatggtttgtccacccttggttagtttatgcatttttgccataatatctcctttcatccgcctaagttccgggggaacttggaaacagcattgaaaatgaatcagataagttctgttcaaaaaatagggtagaacaaaagatatttttcttaggattctacccactttctaccatgtatctatttctactatttttttaggtgaaaaagtttgaaacaggaatgtgattttttatctttgcagatgtgtaagaccaagagcttgttgcggattaaattccgtagcaggctctttttttattgtcatatcgtggcaatggatttcggtgctttggcagcgatgatgcaaacggatagggatatctttgaggtgtgtatttttataattcagataaacaatagacgaaatggaattaaacgactggttggctataatcggggctttcggaggattggaggctgtccgctggggtgtcacgttctgggtgaaccgcaagacgaacgcacggaaggaggatgcgtccgccgattcgatggaggatgagaacgagcgtaagcaggttgactggctggaagaacgcatcgcccagcgtgacgccaagattgatgcgttatacgttgagcttcgtaatgaacagtctgataagctggcatggattcataagtgccacgagctggaactgcaattgaaagatgccgagcataaccgttgtgacaggcctgacagcgaatgcggtcgccgtattccaccacgcagggctgcattaattaaagataaggaggaaaagaaaaatggctgacgtaagaaaacttgcaccgtttatcctgaagtgggaaggcggttttgtaaatgaccctgacgatttgggtggggctaccaatatgggagtgactatcggcgcatggaaatcgtgcggctatgacaaggatggtgacggtgacatagatgtggatgatctacatctgcttactcgtgaggacgttgttaatcgtgttctcaaaccgtattattgggacagatggaaagctgattcgatacaggatcagtctgtggcaaatattcttgtggactgggtgtgggcatccggtgcgcacggtatcaaaataccgcaggatttggttggcgtgattcctgatggcattgtcggacctaaaacgcttgaagcaataaacaggcaaaaacctcgtgaactgtttgatcagatcaagattgcacggtttgatttcatcgaaaatatttgtcgtcagcgtccgaccaataataaatttaagagaggctggatgaatcgtataaatgacattgcctatgttggctaaggttatgaactgggtaagccggcatatattgctggctccctttatgtgtctgttcctgctgtttgcctgtggcagctcgcataaagctgtcaaatccgatgcagaagtaatcagaaaggacagtgccagcgaatcggtcaacatcgtacacgaatcaaccacctctttgagcgaactcattaccactaatggcagctacatgattaattttcggatttatgatacaagaaagcctcccgacagcctgaccgggaaacctccgttattggctgacggtcatgtagaaggtaatttcaacaagaaggaggataaacagacggtggtagccgatactacaaatgtcaaagctgataaggaagccacttccatcaaacatgagggaaccaagactgaagaggtaaaggataaaaaagaatccacgctgcctgaacaaatcggttttgcctgtgtttgtataaccgttttgattgtcgttgtgctgatagtacgaaaacattggcgcaacagacaatcttcatcataagactttaaatttataaattggactgccccggcttgcataagtcggggcattattgtaagtttgtactgctaacttgaaaataaacactatgaatgtagaagatgataccttagtcattgttagaggcataaatgatgacttttttaaagagaactttggtaatttatgcattagttttggtggagattcacgtgctgttcctgttaaggatgcctattatgtcggtttatatttaggtgcacctgattcagcaataacccatattggaatagttgaaaaaatagaacgtggtgatacgcctttatatgccgatttttatttgaaagcagtaattcggttaaatcatccggttgacccggggcaccagataaggaagcatgaatattgggacttgtccgattttaaattagaaccagcacttatggaaatattgaaagtaacattactcaatattaaggtctgaaacttttgcagtcagagtaccttgtatgccggataaatctttttattaaaaccgaattttatctatcgctatcctttggggttgagtattttacgaaaaactaaatatttactttataaaagagaatatctatggatgaaaatttaaaaaaatttatagatcaatccattaaaagtctggaatttataaaaaatcatggagcaaaagaatatagttatgattttgactgttctgaattagataatcagtatctgactgtagacatcaccaagtcagaagcgtacaagaaaaaatttgattctctaaaggagattaaaggacctgctgtttattggtttgaaataacttctaatactaaccagtcagaccttgtcaatgcactggaggactattctagaaaagataaccatagggctgttccggttataaaaaaaacatattgtgctacaagcaattatttatatgtcggaaaggtcaaaaagaatttctatagcaggattgttcaacatttagggtactttaaaacagctgctactcagggattacaactttgtcattgggggaataatttatcacttaaattaaaacttcatgtaattgaattcaatcgtgatatggaagatatgatgcctgcaatagagcagcattttgctcaagttttaaagccattggtaggcaaacatatataacataaataaatttaaacagcttaggatagataataaataattgtttctctatttacagaaaattttattatgataaaagacgaatatacaattgagaatgattatcctttaatggaatctataaatcattatgcaaagatttcaaataatgacgattatagatataagtttatagaaatcatgaaacgaatagaagcggaagatgttgtttttctttcggatttattgttattggaaacagaattcaaatgccctattagagtacaactagtgaaagattccgttttttatttaagagaacagataagtcggatttcggaagtaaaccgctttttaggaagaagaattggaaaaaatagagacaggaagttggattttaatcatctccgaaatgccattaatgcaacttggtaagataaaaaactaaggcagccgaataagctgcctttgactttttgaacaaattatatattcaactggagaaagaatagaattttgcgtatttttgccctgtgattttggagtagagccaatctcataataaaagtttgggaggggtgtcgtaatgcacgatgcccctccttttttgtaatacgtaataatgtgacaacaaatatttttagaaataggcaaatccattagtattttgttcaataaaatgtgaagtagattgtcaaaaacgaaactaatctgaaccgttccagcttgtgataaataggaacggttttattttgataatatttctgttaaaagataacccatgaattatatgttcctttatctttgcacactattaacatcaacttatatatcatggctgaaaaagaatcttattccgaagaggaattgaatgaaatgatcgtatggttcaataaccatgccaatgaacttccaaaagaaatgcagattaacaaagcggcttttaccccggatttgaaacttactgttgaaagttgtatcatgcaggctaagcaatgtctgggtaactataagatggccggagctttccggatgctccaacaaatcagagagaaccttgaaaaggcggcccaataagctgccttttcaatatccttctggaaactttctttactttacttcaaaacacaccgatacttcactaagtttgcccttatgcagttgataaacataacattctaccatattccctttaaactcttgaagtttactgtttaaaaatcgatttttttatttattttgtagctaaataaagatatttattcatagaacaaaaatataaaagtgtgcaattggtgtgcagtttaaaatatgtatatatataaatgattaataattagtgtgttatgtgttatagttatagtttgtggagaagcatgacaaatattcaggaagaactgttgcctgggatgaatgaacacgatttatagttgatatggctgttttgttgttgggggattataacgagactgcttatagttagttgtttgtacttgtgtgcagctaaccaactatcaatattatcaatgtatttagatggggaagaatgttacaaaggtatccttcctgttgtttgttgtgccggatacaaggtgatgcacatgtctgatttgttggggaaagtgtagaaatattctacaatgaaaatgtggacctttttctttgaaaatagtttgctcttaatgtatttgattgataatcaataccagtctggttttggcataggaattgttttctctttatcataagaataaccatttaaatatattaggatatgagaaagttttttattgtgttagtatggggaatgggattaggacttgcagcgttgtttacaaaagatatagtacgtggggtgaggaatgtgattgcgataaatcatttcacccctactgaggtgaataacgctccaataggatggcatcaagacttgtgttgttatcttaattaatttgtcgtcatagagattttgttcataattgaaattggaaacaactgttttttatggcagctgtttccaatttatttgtattcagttgtccttatactcttttcgtcaagtgattttcgtatacaagtctaggacaaatgtaaaataataaaggggattggatgaatggttattaatgaatgtttttaatgtcatcctgcactatttgatccatttctttcatcagtttttggggattctttttgggggagaatcctttatctttttcttcatgcaaaagatctgtttcagttatgtcctcaccccagtcttcgaacatattcgttgccggttgtcctgacaatgttacattctcttctgcgatagggacatttctctcaataattttttccataatctaatctatttattgtttactaaatgacaaatatgggtagaaatggtttaatgatttaataaagtttgaagtttatgataaatagaaagttcttgagcaagctagaaaaacctgatttgcgagcaactctttatctttctttttaaacaactttgccttgtaaagagtgctcctctgtcctttcaattgaaaaataagttttttaaaaagcaattctttcggtctgtttgaggtttatttgcaaaattgtggggaggattttggttcttaaaggatcgttttgttctctgataacttccggaaatgttcttgacgtacttattaggaagttcgggtgtttatgtcctcatgccatcactgcatgtataacaggctaattataaacaacttatatgcagatggtaaaaatatttgttctcacttatgctctcatgctctcataacgttctgaaacatattttcgtgtaacatgcttgtcctcagttatatctattttttataggctattccaggcttgataggaagtagggtgttttcaggcttttttctcgcaagaagtgtgcataaggggtttgtacttccatagaataatggcttacaaagtcttggtaacggtaaaaaagatcaagacgtttcggtaaaagctccttttctttttttaaaaggcggttatcttttttgaaaagctcttgatctttttaaaaaacgtccttatctttgatgtggaattttattctggacatataagatttcatatacgtccgcatgagtttgtacgtacgtataactatatggggcgtacgtgtaaaaaacatgttttctgatgtgggaaaaacattgtcctgttatactccccctatttttacaagtgattcttctttgtttctgcctttttcattttgttgcatttttagctgtaacactatttgggggactaggcaaggagaaaataaaaaaggctatcttcccagacagccaatcttttgttaaccttaaatctaatactatgaaaaacacaatgcaaaggtacgtattcttgagatagttccaaattttagaaataaaaaaacgcttgttataacatggtttagcaaacaaacttttttcttaacaaatagcagattgaaagagtggagttggttgcttttttgttcattggaaataaaacatgtttgttacggcaataactcattgtattattcttaattcgattatttccattatctttgcactccaaaaatgcttgttgatatgcaattgttaaaagcgtaatggatattataggcagattgtttccggataaaaaatagattaaaatatatgttgtctcatggtatttattcagtaatattgctgattttttcaaatgtctttatgacgtttgcttggtatggtcatttaaaaatgcgacaagagtttagttggtttgcagcccttccgttgattggtgtgattgcatttagttgggcaattgctttttttgaatattgtcttcaggttcctgccaatcgtcttgggtttaaagatagtggaggaccgtttgatattatgcaactcaaggtgattcaagaagttatcacattggctgtatttacattattttctgtttgggcatttaaaacagaactgaagtggaatcatttagcggcttttctttgtctggtccttgccgtttattttgtctttaagaagtaatgagttttggttaataattgctgaatcctttttgataagcaaagtgtcttgtttgggcaatgaatcttgttcagatactttgctgattctaggaaacaagatagaatcctgtcgggttggtacgtaactttgatagattttccaacctttggcacgattacgattacgtcggatggcacgtcctcgtttggttaaagattcatacagaaaattgtcggcatccagtcctcctattaatgggttattactgggagttaccgtttgatccatgccggcaggtaatattacatagccgtttcgcaaaccgggaatcagtttgatatttagtttccatgacattgtcagagagtcttttcttttcaagaaaatgggatcattaaccggatcttcatgccatgtggtgtaaggagtgtagggagtaagacgcacaaagttagggcgtacccatttggttgtgtcgccgaagtttttaggcaagtctttcagaaacttcatccacggtttgtcttcggacatgaatggagtaccttttatattgtctttgtccgatttaaagtcgaaatggatagactttacggcttctgtgttaatttttagttctccatctccattcaatagctcctgtaaacgaatcgagtcctgtttgttccattgtgcttgtgctgtcagtatactgatagtgcagaataatatgctaaaatttaccctctgggtcattcgttttttctttatgattataattggtaacaaaagtaatctggagtgagtttaatgctggttaaatttgagttattaattgtttataatgtgaatattttaaattttatttggttaataaaaggattcgtttacacctcttttgttgttatggagcacacttcatatagacatttagatagttacctcaatatttggtaataaagttttgtattttatctccagatatagtgacagagttcatattcatggtatgtatttcaattgatgtcagtacattggtcagataggcgatataggtctatatggatttatggggtccattctgtctgtgtgatttattttcggtatagaataaaaatagcccgttaatttttaataacgggctaaattagtgaaaatgataatatttatttggaggagagttgtgcatgcatggaagcagctgctttacgtccgtcacccattgcaaggataactgtagctccaccacgcacaatatcgccaccggcataaatagtcgggattgacgattgcatattttcatttacggcaattgttcctttgcgtcccaattccaatcctgggatggaactgggaacaatcgggttaggggagacgcctacgctgactattgccatatcgatgtcaatggtttctgttgctcctggaatagctatcggactgcgacggccggaagcatctggttcgcctaattccattttctgtaaaacgacttgtttcacacgccccttttcatcggcaatatattctatggggttatgcagagtcaggaattccacaccttcttctttagcatgtttcacttcctccagacgggcaggcatttcttcttccgaacggcgataaataatcattgcgcgttctgctcctaagcggcgtgctgtgcggacagagtccatagctgtgttaccaccgccgattactgctacgcgtttgccgaatgttacaggagtatccgaatcctcgctggctgcatccattagatttacacgggtcagatattcgttggaagacatgatattgatagaattttcacccgggatattcatgaagttggggagcccggcacctgatgctacaaatatacctttgaaatcttctgcttccaagtcttccacactgattgtctttcctacgatgcagtccttcatgaatttgacacccatcttggataaattgtcaatttctacatctacaatcttatttggtaggcggaattcggggataccatattttaatacgccccctatttcatgtaaagcttcgaatacagtgacatcgtatccctgtttagccatatctccggcaaatgagagtccggcaggacctgaaccgataacagctacttttatattgttcttttccgctacttccggtacggatatttggccgctttcacgttcgtaatcagcagcaaaacgttccaaatagcctatggcaacggcttcgtgtccggctttcagatgagtgcattgtgattcacactgtttttcttgaggacatacacgcccgcagacagcaggtaatgcactggttgcttttaaggttttggcagcttcaaggaattcaccgcgttctatatttttgatgaatttcgggatattgattcctacggggcatccgttcatacaagtagggttggggcagtccaaacaacgttttgcttccgttatagcttgctcttcattcaaacctagattgacttcttccttacggctatgtgaacggtattctgcatccagttcgttcatttttacacggggaatagccattcgttctttaggcttcatggctttacgtaagcttgcacgccattcggcatcccggccgtccagttctttagtcgcttcacaagtcatcggcttttcggtgtctagtttgtgaatttcttctttttcaatatctttgaaagctcccatgcgtttcagcatttcgtcaaaatctacttgatggccgtcgaattccggaccgtcaacacaaacaaaacgtgttttgcctcctacagtgatacggcaggcaccacacatgccggttccatccaccataatggtgttcagagaaacgtctgtgggaatttcatattttttagtcagcaggcaaacgaatttcatcatgatggcaggaccgatggcgaaacatttgtttactgtttcacgtttgattacttcctccacaccttcagtcactaatcctttatgcccgtatgagccgtcgtctgtcataatgattacttcatcagaactttcacgcatttctttctcaaggataattaattctttggtacgtccggccaatacggtaattacacggttgccggcagctttcaaagcctgtacgataggaagcatcggagcaacgcctactcctcctccggcacagactacagttccgaaattttcaatgtgggtggctttacccagcggaccaacaacatctgtaatataatctccttcgttcaattcacaaagtcgtgtagaagaaagaccaacttcctgtactactagtgtgatggtaccttttacgggatcggcaccggcgatagtaagtggcatacgttctcctttttcaccgacacgaacaattacgaaatgtccggccttacgcgacttagcaatcagaggtgcttctataaccaatttaaagaccttttccgagaaatgttcttttgaaataatcttattcattttgctatactgtaagttagttatttttctgagttgattgtcaaattgataatttatgcaaaggtaggattatattttttaaagacaaaagaaaagccgcccttttgtgaggggcggctggagcctatcatgataaatctgtttttgattttgccggcagttcgtttttaatgtgaaaaaaggattatttctttgttctgattttatatcctatcattccataatatagaatgaaaaggaaacagggaacacagatccaataggaggtctggaaactagttgcatcttgaactacaccgcgcacccatggcataaccgctccaccggcaatggccatggttagcaatgaagagccggctttggtgaatttgccgagatccgccattgcgagaggccataatgcgggccacattaatgagcatcctaatgccataaagaatatgcagtagactgaaatttcagccggcatggtcgctactagtgcagaaccaatgatggctatgatggcacatattttcattgcggtagcctggctcagatatttagggattaaggttgcgccgcaaatgtatcctactaccataccgatggaagggataaatccgtaattgtcacccggcagctccaatgctttggcatatccggttgcagttgccaaggctatggtttccacacctacataaaggaaaagagcaattactcctaatagcaagtgaggaaattgcatgatagaagttttaccttctgcataaggacaggcaaccgcttcttccgcatctgtggtggcatcctctccggcagcttttacttcaggcaacggagccattaaggcgataatgcctaatacaacgaaaataccgataatgataccaaatggctggaacaaatcctccattttaatttggtctatggttttgccgattactaaggtaataaaaagagtagtagcaggccaagccagtttgttgcaaatacccatgatggaaatacgttttgcggcagactctataggtccaagaatagttacatatggatttactgaagcttggagtactgcattggcggcaccacagatgaatgaggcgaaaagaaaccatacaatagattctgtagcagctgcttggatgaatagtccaaaagcgatagcgaaaatgatgaatgaaagagccattgtttttttgtaaccgatggcttcaatacatttggtggccggtatgccaaaaattaggaatggaacaaacgtggcggcaagcagaagattggattctgaagccgacatctccattgaccgttctaataccggcatcaggaaagagttaatgcccaatgcaaaaccaattgcaaaaaacatcatgcctacaaaggcaagaggtaccatgaaatttttctgtgaagtattcataataataggttaaatggttagtaatcaggttgaaataataaaaaagaatgtcattctgcatacaagacagaatctgtcgggaaagatcggattctgaacaatactcagaatgacattcaatatatgtaattagctgttattagtcaatcatctcgaatccgcaataaggaactaatgctttagggatgcggataccttccggagtctggttattttctaataaggctgcaacaatacgcggcaaagctagtgcggaaccgttcaaagtatggcataattctgttttcttttcggcagaacggtaacggcatttcaggcgattagcctgatacgtatcgaaattggatacagaacttacttccagccaacgttgttgtgcttccgagtaaacctcaaagtcaaagcaaagtgcagctgtaaaactcatatcaccaccacaaaggcggagaatgcgataggggagctctaatttcttcaatagaccttctacatggtccaacatttcctgatgtgactgtttggaatgttcgggtttgtcaatgcgtaccagttctacttttgagaattcgtgcaaacggttcaagccacgtacgtctttgccgtaagatccggcttcacgacggaaacattgagtgtatgcacaattcttgataggcaattgtttttcgtccaaaatcacgtcacgataaatattggttacaggaacttctgcagttggaattaagtacaaatcatctacttcgcaatgatacatttgtccttctttgtcgggaagttgtcctgttccgtaacctgatgcagtgtttactaccgtcggtggcatgatttcttcgtaaccggaagcgcgggcttcatccaggaagaaattgattaatgcgcgttgaagacgtgctcctttacctttatatacaggaaaacctgcccctgtgattttcacgcctaggtcaaaatctatcaagtcgtattttttggcaagttcccaatgaggaagtgcattcttggggagttcggtttccataccgcccattttttccaccacattgtcttcagcgcttacaccttcgggcacactgtcgtaaggaacattaggaatggtgtaaagcaggttggtcatgtcttcctgtgctttgtccatttctgcttgtaaagctttgctggtttctttgatttcggctacacgtgttttagcggtttcagcatcttctttctttccttctttcatcagttgcccgatagatttggagagcgagttcacttctgccaggtttttatctaattgattctgtgtgctacgtcgtttgtcattgaatgcaagcacttgttctatcgttgcttttgcatctttaaagtgcttcttttccagtccgcggattacctcttccgtgttgtctgtaatttgtttaatggtaagcatatcttttcagtctttttgatatttcttgaattaatggacaaagatagataaaaaaatggtaaggtgtatgagttattcgttacttttgtatccagattagaaaatgaaaagtaagaaggatgaattatcttgagatagcgggcactttaatcggtctgctttatttatggtttgaatataaggcgagcatttggttgtggccggtcagtgttattatgcctgccatttatatagttatttattatcaagtaggtctgtatgccgattctgctatcagcatctattatttgttggctggaatttatggttgggggatgtggttgcgccatacgccggataaaggggagaagcctgtatctggcacaccgtctaagttgctgctgcctatgtttgttgtgctgcttgtggtgtttgtgctgatagggattattctcgaaacttatacggatagcacagtgccctggtgggatagtttaacaacttcacttagtattattgccatgtggatgcttgcacataaatatgtggaacaatggttggtatggctggttgttgatattgtttcttgtggtatctatatttacaaagatttatatttcacttcttttttatatggactttatacggtaatcgcttttttcggttatttgaagtggaaacaattaatgaatttatcttatgaaagagtataaattgccgataggatgtgatgtgccggaaacaattattctggctgatggtgattttccttcccatccgttggcgttggaatggttgaggcagtgtccttatgtagtttgttgtgacggggcagcaaatacttatattcgttcaggtagaatgccggaagccattgttggcgatggtgattctttattgccgggtattaaagagcgatatgcttcgttgattcatagtgagacagagcaggaaacaaatgatttgagtaaggcattccgcttctgcttatcacaggagaggaagcgtattactatcatgggggctacagggaaaagagaagatcatacaatagggaatgtcagtttgttggcagattatatggagaaggcggaggttaatatgatgacagattacggtatctttgttcccataaaggaggacagtatgttcgaatcttatatcggtcagcagatttctatttttaatatgaatagtacggttttatttgccgaagggttggcttatcctttatctgtgtttaccaattggtggcaagggactttgaatgaggcattggccaagcattttataatccggaccgaaggtaaggttttagtgttcaggacattctaaaagaaaagactcttcaaagaatgaagagtctttcaattttttttattttgtaactgattatgcttctacagcaggaacaacagaaacagatcttctgtcatcgcgacctactttgaaacatactgtaccatctactaaagcgaaaagagtatggtcacgtcccataccgatgttttcacccggatggaattctgtacctctctgacgaacaatgatgttacctgctttacaagcctgtccaccaaatatcttaacgcctaatctcttacttgctgattcacggccgttcttagaactacctacaccttttttatgtgccatttcttcttaaattttaaatgattaagcaataacttgtttaatagttaactctgtaaactgctggcggtgaccgttcagttttctataaccttttcttctcttcttgtgaaatacaagtactttatcgccttttactagcggagatactacttcacaaactaccttggcaccttctacagtaggagcacctacagttactgttccattgttgtctaccaacaatactttttcaaattcaacagttgcgccgttttctgcgttctgaatgtggtgtacaaacagttttttaccttcttcagctttgaactgctgaccgttaatttctacaattacgtacatctttttataatattaaacggttttctccgtaaggtggaatgcatcactgccttcgctttttctacctcatcggactaaatcgggcacaaaattactatatttatttatatctgcaaagaaaaatcatcttcttttttcttgtactcaatgtttttattcatattgcattttgtggatgtgcgattgtataaataaggtttgtgtgattgtacttttatttaccccattgtataatataggctatcaatacgatgatgcctataatgatagaacagactagcaacagtcccaaaaagcaataccaaaacatgattattgtacggcagaaacttttccaccaggaaagtccaaacagttggcggtaatcccagacaaataatataaagattgctttgtaacttaaatcaaaaatatcattcaagtgtgctgtcccggtaaatggcaggatcagtaaagaaatccataagatttggcaagcgatataaacttgtgcaaaaaagttttctgtcaggtttagtcgacgtccgatagaggtccggcagaagcttaatcgggtgcttattgtgaaaagggggagcaaagcaaggatgctgaaggctttgttgccatgtatccaacttttcatcagattaccgactgcagagagaaaactattttctgtaaaataattgtttgtcatttcgttgaaaacattttttatttcacttccggcttcgctcaaatcattccagatatcttgatcttcatagggattatcttgttgggccatgtttgccaatatgttttttcttatttccgatatggttgagtcttgtttgttggcttctcttcctaaagtggctatccgcaagctatcttgttttgccaaagtcgtaccaatttctttcatcaggcctctccagtcatcaatctctccattttttgcttttattttttgtttaagctccttttttatttgtttgcttatttctttttttagctcatcttggtcttgattgctgaattttgcatcgatttgtgcttgtattgattctgataaactgtgggtttgagcccaccgtgcactgtctgcataagtaatactttgtcctaaataatatttggtacaactgtctgatgtctgttcctgttgatatttgatgtcatccatcaggctggcgatagtaggctcttcttccatttccttttccgatagttttatcgctgtcgggtcaatgagctgtacacccatgatatatagagcagctagaacgaacaaggtttgaaatggtttatagtaatgtacacgtttccccctcagataatcccgtatcatgtatcctggtcggtagagtagttctatcaggttacggctgaaaccattgtctatgttaaagaatccgcttaaaatattctgaaaggcatttcgtatggtaaaacgtggtgtgtggtggttttgtccgcaatggggacaataattcccttgaaatgtgtttccgcagttcttacagacgcaacatgtcggattctcttttatttcatgttttcctcttatttgtttttgatggaacagtttgtagaaggctactatcttttgaggaaaataggaagaataaaagaacttttccggaaaatgtttgtctggttcgtaaggggtgaatttatgaattaatggaagtaacgaaagattgtctaatatctgccgatgtgggtatacaatcagttcttcacgggttgtcatgccattgagtacacctacaaagtctactttggctgcttgggcggtttcagcgtccactgtgctgtcaccgatgtagagtgtttcgtttttctggcgatgcagtcggcgtagtgctttttttataccttgaggatctggcttggcttgctttacatcctctcctccgataataatgtcaaaaaaatctttcggaaaatgttggtctaccatttcgcggatacgaaaacggaatttagtggaaatgatacctatttgggcgccttgacttttcagtgttttcagtacggtaaccgtttcaggaaaaaagaaagtgttgacagtcatgtatgtatctgcttcctttacatattcttttttatattcggctaatgtttcgggagcagtgattccgctcaaaagactgaatgaatcttccagtgtttttccaatggtgcgttttatggcttcatcactgatgcccgtatgcccatggcgttccagtacattacgaaaacagataacgatgccgcgtgaagaatcggctagtgtgtaatcaaaatcaaaaaggtatgttgtgtatttcattctttcaaattaaactcattttaatgtaatgaatatattgcccggaaggatcttgtcaaggacggcctccacttaaccagtgtttacgataataatcttcattcaggctgctgattatgactccccggctggtactggcatggataaacttattatctttcaaataaatacctacatgactggcaatccgtttttttctaccgttatggaagaataccaaatctccttcgcgcaagtttctcttacttactttatggcaatcttgggtacgttggtcatctgagttacgtttcagctttttgtggtatacctttttatataaatgtgaagtcagtccggaacagtccactccccgtttgctgttaccaccgccacggtaggggactcccagccatgctgctgattctacgtacagttggtgattgtctttcatgtcaatatccatattcagacggatggaggcacgcgccagttccttgtagttataacgtggggcagaggtaccgcatgaagccaacaacatggccagtgtacctaataccagcaaatgggatagtagttttttcattctgttacattaaaatagtcctctaattccttttcggcggaattccctttattgtcaatatctcggataatctttccgttttccaacagagcgatgcgtgggcatatatctactgtgtggttcagattatggctggataccagtatggtggctccggtttcttcattataagctttcagtaaatgcttgataatggactgcgaactagggtccagaaagttgaacggttcatctagaatcagtacctgcggttggtgcagcatagccgaaatgatacctattttctgtttgttgcctgccgaatagttacgaatcagttttttttgtccgatgacttcgccattcataaaacgttcaaacctagcgacacgtttatctacttcttcttttgttagcccgtacatttttcctacaaagtagaaatattcttcgggggtaagataatctatcaggaaaccttcgtcaatgaaagctcccgttatatttttccattcctcactccggctcacatcgatgttttcgatatgtacactgcctccgtcggctttcagcaagtccagcatcaggcggaacagggtcgtttttcctgctccgttattgcccaccagtcccaacatgtcaccgctttgaatggaataattttctatgtctacagccactttcgggccaaagttcttttgtaattggtttattatgatattcatacgcaattcgttttaacgtgagtcacggaagccttccatattctcataacggcgcttcatgaaacggttatagatattttttatccaaatattgtgggttgcaatcagtaacaaccctataatcatcatgatgatgcaggctgtatcctgttcaaagaaagccgtcagagctttgttgataatcaagggcaggaaaaaagcacatgagatgataatggtctggaataaggaacttccccgattgcttctcatgacattggcgtttaacgggagtgtctttttattgtacacagccagttgcagcatcatagcgaatacgaatcctgctgtaaacagcatataggatagagccatgaggaagggtatcttgcctttagctacagggatcatcataatcaggaaagggatgaacacgatgatgcagttcaggtaatacttggcacgaagcaagttatagatagattccttacggctcataagaccgtctagatagttgccctcaaaagacatcacttgccccagggtcatgatacttaaaatggcaaaattgtatatgcagataaaatttatcattcctgttccgtcatacacatccgtgaaggcaatcagtgccgaaaaagcaagcatgatgataaatcccatgcggaattgtgtctttacggttttgttacggaaacacagttttagttccagacgtagatattcacctacgtcaccatagcggtccaggaatttatattcggatacatgcttcatcttggtgtcttccactttagctatttcattatagatgaagtgtagctgtagcttgcgatttactagcagaagcaacaaaatggctgctatgacacctagaaaggcgagtatgtttccttctataaatccttctcctagattcatcatgaacgtggaaaccggatttccttcgggaataaattcagttcccgctaataatccgtatactccgatcgggagaagtatataaagcaatttctcattcagtaaagttttgcatatcaaataccaataactgttcatagccatcagaagccaaatgccgcacagatagcataggatgcccgtgaatccatagaaacggataatcgtaagcagggcaaaaggtacgatcaggaaaaaccagaagaagttgtaactgctgattccggattgtagtaacagggtatccaccagcttattcttttttattggcataagcagatagggcttgatttcttgcgacatggccggttgcagcatgaagcgtagcaaaaaatcaagtatcagaagataaatcaatccttggttcatgatatggtaaggttccatgctgggaaagatatcttcaaaagcgaaggacagcatgaccccgataaagatgaggtatgctgcccaaaatgcgaccataaagtaaattaaaaacttggcaaagcggttcctgtcgaatgcaggattccgcttggctgcaagtttttgattctgtcttataatagatagaagcataggcttggatgggattattttgtttcttccgaagtcatgcttacttctatacggttattctgctccaacaaggctttggtaaattcttgcagatctttagcggtaatgctgtttactatgtctgcgtagccggtgttcatatctgttccttcccagaaatattcatccagcatatttacccaataactgttttctttggcattttccttgtatttcttcagcatgaattcttttaccttgttcaagttttcggtggacggaccctcgttggcaaattggttcagttcattcaaaatgatatccgtcattttggcgcgtttggcaggatctgtatcgaaatagatttgcagaactgctttctcttttggatatttggtcagactgccgaatgcacttacaccgtatgtcccaccttctttttcgcgtacgctttcagtatacatgatattcagtatctgtgaaagcatactcatcatgatttggtttttcaatgtgtatgcgcattgcccgttgttgattaccaatacggtggctttaggagtttccaatttcttgttgaaaatgttcttatagtcaccttggcgcatatcaatgtggttgtcacggaaggtttctttgcgattgacggaaggcagagcgcctaaataagtcgcaatcagtggttccatttcttctggtttgatatttcctacaaagatgaaagtaaagtcgctggcatctttgaaacggtctttgtacatctccataattctggcatagtcaatcttgtccaccatgtcggctttcatacggatagtacgcggatgtcccatatagagggctttttgtaatgtatcctgtaaggcagtcattgggttggcctcttgatttgccaaagatgcttgtagacggttcttgaatgaagtaaatgcatcgttatccattcgtggagccgtgaatgacaaatagactaattgcatcagggtctcaaaatctttgggtgagcagctttcgctcagcccttctgtattaccaccgacggaagcacttacactagcttttttacctgccaatactttctctagatcaacattgctgaagttacccaagccgccgatacttgctacatcattcatgacattgatattgataatttcatcattcgggaacaaggaactgccacccggactgaaagctctcattctgatttcatccgctttgaagtcggtttgctttaagataacgcgtactccattggacagagtcaagattgtagaaccaaacggaccattttcctgttttgtaatctttccgccttggggcttttcaggaatcaaaggttcatcagaaactttgtcttcataagcagtcagtgtttcagcttttaccttattgatagcagccaaaacttctttcttggatggaactttcaatccttccttttcagggaagaatacgtttactaccagattgctgtcggtaaccaaggctggaatcagactgtttaccatttccacagacaggttggggacgatctgatttataatggcgtattcattttcaatacctggaattggttcgttgtcaatgaagtggcgtacatattcatccacgtatgcaccgtttttcactttattgcgttcgttgtatgcagattccagcatacgcagatagtccgctttggcgcgggcatattcggacgcggtgaaaccaaatttgtgggcccgttcaatttcacgtacaatggcggttattgcactgtcaattccgtcttccttgcttgctactattcctgtaaaggcatcttttgttttggaaatcagaaattcttggtcgctgacttgagcgaagatgaaaggaggattggctgtttgggtcagttcgttcagacgggcgttcaacatattttctatcatggatttcatgtagttcactaccagataatccatgtttcccttttgttcattaggaattgcttcatgtttgtagcataaataagctactgggtttgcctgttctttatccgtttctattgctacaatagtttccttattgtcgggaacttggaagtattctcgttctgctggggtttctggcattttaataggagagaatatcttctttatctttgcctcaatcttgtctacatctatatcgcctactacgacaataccctgttggtccggacgataccatttttcataataatcgcgtaatgcctgataagggaaattgtctactacttccattatgccgataggaagcctataggcatatttacttcccggataaagggtagggagggctttttcgtacatacgcatcatagcgtttgtgctagtacgccattcttcatgaatcacaccgcgttcgctgtctatttccttagggtctagtgtcaggtcatcggcccagtcatgcaaaattagcaaacaagaatctacaacgccgtcacgtatcacgggaacattggaaatattgtatactgtttcatctatgctagtgtaagcattcaggttttcaccgaatttcacccctatgctttccagatattggatgagggttttgtccgggaaatttttagttccgttaaagcacatgtgttctaagaagtgtgccaagcctcgctggttgtcttcttccaaaatggaacctactttttgagcgatgtagaaatcggctcttttttcggggagttcgttgtgacggatgtaataagttaatccgttgtccaatttaccgatgcggacgttagggtccgtagggatgggaggcgtttgctgttgtgcaaagcccaccgacacgctgcctagaatgatccaggcagctgccatcttccttagaaaatgtgtcatagtgtttgttgtggggttagtttattttattataataagtcattggcagataggtatctttctgcttctatggcagctttgcagccacttccagcagcagtgatagcctgtcgataatgcgggtcggccacatcgccggcagcgaacacaccggggactttcgtacgcggagtacctgcttctgtaataatgtagcctacttcgtctgtgtctaaataatccttgaaaatgtctgaattgggcttatggccgatagccagaaagaatccgtcgatgggcaagtcataacattcttcgttgcattcaccctgacgctttaccaaatgaacgccttctacgccattctctccgtataagccgacagcgttgtgttcgaacagtaccttgatgttaggatggttcataacacgtgcttgcataatcttggatgcgcgtaagaacggtttacgtacaatcaggtaaacctgtttggccagtcctgccagatagacagcctcctcacaagcagtgtcaccgccacctactacagctacagttttcttgcgatagaagaaaccgtcgcaggtggcgcaggcacttacacccattccggcatatttttgttcgtcttccagacctagatatttggcggtggcacctgtggatataattacagtttctgcctcaatcactttttcgtcatcaatggtgatgcggtaaggacgtttgctcaggtcggcggaagttgcaataccattgcggatatccgcgccaaaacgttctgcttgtttgcgcaaatcctccattagctgggtaccgctgataccttcgggatatccggggaaattctccacctcggtagtgatggtcaactggcctccgggctgtaagccttcatataagaccggagcgatgttagcgcgtcctgtataaatggctgcggtatagccggcaggacctgagccgatgataaggcatttaactttttctgtactcataatacttatttctttacttaatttaatttgatgaatattatattatctctctatcttgaactctgtttgctatcgtaagtctatcacttcagcgtttgggaatttctttttatcaaacttgaatgtcgcattgtccagcggctggttggtttggtaagaagtgacgataatctcgtttgccgatttattattttgttctacctttatatataaaggctgatatgtttgggaaacgaacaaggtgatggatgtgatatcttgtttattctccggggtcagtatcacttcgaacccttgtttgccgttacggctttttgtccccgcatacttataattatatccgtttttgtaaatggataacagtgcgtatgggttaatggtttgcaattcttccggggtaggattgctcacattcacttcttcgctgctttccagataactccattgcgtttttccgtcaaaccagctttgtattccgccactgttcagatagaactggttgccttttagcaataaggttccattgcctgtccccccaaaggtggcacggatgcctccggcctgttgcagggcattggcggttttgtccaatatctcccgtgcctgtttgtccttttgtgcggacaggctgaccgaaaggaaaaggattaataccagtaaatatgttcttttcatttttatcataacattattaaacaacttattgttgtagattgttcaatttcatttccaggtctgtttcatccatgcagagtacgtcacgcgccttgcttccttgagtggggccaacaattcctgctttttccagttggtccatgatacgtcccgcacggttgtaaccgatagagaacttgcgctggattagcgaagtagagccttgctgatgaatcactaccagtctggctgcgtcttcaaacatagggtccaatcggttcatgtccacttcccctacactgctttcactctcttcgcctacgtattcgggcaacatgaatgcggtggtgtatccttgttgtttactgatgtaattggctattttctccacttcaggagtatccacgaatgcacattgcacacgtaccggatcattaccttgcaagtaaagcatatctcccttaccaatcagttgttgtgctcccgaacggtccagaatagtacgtgagtccatcatggcagctacgcggaaggcgacacgtgccgggaagttagctttaatagtaccagtgataatattcgttgtcggacgctgggtggcgataatggcatgtatgcccaccgcacgcgccaactgagcgatacggcagataggcaattccacttccttacccgctgtcataatcaagtcaccgaactcgtcaatgatgatcacgatataaggcatgaagcgatggcccttttccggattcagctgtcggttaatgaatttcgcattatattctttgatattacggcaaccggctttgcgcaacaggtcgtatcgggcatccatttctatacacaatgagttcagggtttgtaccactttagtaacatcagtgataattgcatcttctccatcgggcagtttagccaggaaatgtttctcaatcggagcatagatggcaaattccacctttttcgggtctacaataacgaatttcagttctgccggatgtttcttatataataaagaagtcacgatggcgttcagtcctacagacttaccttgtccggtagcaccggccaccagcatgtggggagcctttgccaagtccaccataaagacttcgttggtaatggtcttgcctaacgccacaggcagttcataggtggtttcctggaactttttactgttcaggatagacttcatcggtacgatacgcgggttggcattcggaacttcaataccgatagtacctttacccggtatcggggcgatgatacggatccccagtgccgacaaacttaatgcgatatcatcctccaagtttctgattttcgagatacgaactccttctgccggagtgatttcgtataatgtgatggtaggacctacgcttgccttgatagagctgatttcgattccgaaactgcgtaaaaccttgatgatgcggtctttgttggcattttgctcttccatgtcaatattgggaccatcatcttcgtattcatttagcaaatccaaactagggaatttatagttttccaaatccagacgggggttgtatggtggaagtacgggacctttgtatgcttcgtcttcctcatttgtttcttcactgattgaaaaatcaggttcatctgtatcttctacttcctcttcttcagtcatataggcaggttcctgttctatttccggtccagcaacctggttgttctcaaaagggaaagggacctggtcttccacttcttcctttatcttttccggctgttccagttcgaaatctacaatggcaggtccgggattggagaattccttcttgttctcttcctttcggggagtttctttgaccggactttcttcagttgcagaagaagcttgctctccttttttcttccgtttgaaattagggtgcaaagccttgcgtataatttgtatggtttcattgcttaaatatacaaagaacaacagtgctgtgatgaacaataacaatcccaagccaggtatacctacttgtgaaattagccagttgcttacattgtatccgtgcagtccgcccggatagatgaaactgtttccgaaagtgccgtcaaaaataaaacccagtgtgatggagaaccagatgagcaggatggaacaggacatgaaccatttccagatacggaactgataggctttcattaatttcatacccactactgccaggaacaaaatgataaagtaagctgccagtccgaaacattcatttataaggaattcggcaagctgtgcgccgcgtgctccggcatagttctttacatggttggtagtctgcatcagttcacccggctgctggttgtccaaaatactttggtccgctgctcctgtaaagaagaaagaggtaaatgccagcaacagataaacagcaaaaataacactaatcaatccgattacaaaatgcgttgtttcattcttaaaaaaagcggagaatcgtttggttgatacctttttaggctctgtctccttatctgattttttctttgccatacgtcttcattctatttattatttcgcaaatgtacatgaaaaacattaattattgccttatttaatctcttttttcttaactttgcgattcaattttaatgtttatggaaaagtacagtcaggtgatatttgacaaaaatacagtagaatttgtgacggtggccgccgaatattgtggttttctggaacgtgcccgtgatatgaaacgctatgattttgtagatactgccttaaaaatacttccgttgctttatttgaaagcgactttgttgcctccatgtgaaccgataggagaggatgagcctgaaatcttcgttactgaagaagattatgaactgatgcgtaggactgtggccggtgtattgggggcgaaggacgattatctggaagtgttcttgccggatatggcatacagtgacacgcccatcaagaaatgtatttcagaagatttggcggatatttatcaggatttgaaagactttatcagcgtattccaactgggactgaacgaaacgatgaatgattcgttagtagtctgtaaggaacatttcagggaattctgggggcagcgtttggtaaacaccatgcgtgccttacacgatgtaaagtatactcctgccgatgatgacgaggaagaagaaatggaagatgagaattcattattatgaaacaaataaaaaaaacgattactaaagccgagatagcagcaatgcccaaggtgctttttcccggacgtatcttcgtgatttatacagagagcgaggccgagaaagcagtagcctacttgaaagatcagcgcatagtgggggtggatacggaaacacgtccgtctttcaagcgaggtactactcataaggtggctttgttgcaaatatctacgcaagatacctgtttcttgttccgtttgaaccggataggtatgcccgattctctgcaagagtttttgatgagcgataccttgaagataggtttgtcgctgaaagacgattttaattcgttgaggaaacgtgagaatgtgcatcccgaccggggtaactggatagagttgcaggactatgtaggacgattcggcatagctgaccggagtctgcaaaaaatcttcgcgaatttgtttggtcagaagatttcaaaaagccagcgtctttccaattgggaagcggatgtgcttagcgagggacagaaactatatgcagccacagacgcgtgggcttgtgtggaaatttacaattgcctgacggaattggaacgtacgggtaattatgagataaaagaggaagaaccaatagaaacaacagtaaatacaaatggcttataaaaaagtatacctgaaaccgggtaaggaagagtcgttaaagcgttttcatccgtgggtattctccggagctatccagcgcattgaaggagaacccgaagaaggcgagatagtggatgtatacacttcaaagaaagaatttatagcttgcgggcatttccagataggaagtattgccgtgcgcgtgctctctttcaaggaaggtgagattgatcatgaattctggaagcataaactggaagtggcctatgatttgcgtcgcagtttgggtttggctggtaatcctgcaaataacacttaccgtctggttcatggcgaaggggataacttgccgggtttgattattgatgtatacgatcatacagccgtgatgcaggcacattcggccggaatgcacgtttaccgtatggagatagccgatgctttgtccgaggtgatgggggatgtagtccggaacatttattataaatcagaaaccacgttgcctttcaaggcagacttgggaccggagaacggcttcatcaaaggaggaagtcccgaaaacatagcgatggaatatggattgaaattccatgtagattggctgaaagggcagaaaacgggtttctttgtggatcagcgtgagaaccgtcatttgttggaacgttatgccaaagggcgtaatgtattgaatatgttttgttatacaggagggttttctttctatgccatgcgtggaggcgcgaatctggtgcattcggtagacagttcggcaaaagctattgatcttaccaatatgaacgtggaattaaattttccgggtgatccccgtcataaggcgtatgctgaggatgcttttaagtacctggatcgtatgggagatcaatatgatttgataattcttgaccctcctgcatttgccaaacacaaggatgctctccgtaatgcattgcgcggctatacgaaactaaacgctaaagcatttgagaaaatcaaaccgggaggtattctgtttactttctcttgctcgcaggtggtagataagatgaatttccgcaatgcggtatttacagctgcggcacaaagcggacgtagtgtacgtattctgcatcaattgactcagccgggagatcatcccgtaaatatttaccatcctgaaggagagtatttgaaagggctggtgctgtatgtggaataattcaatttatttatatattatatagtacaatggcgtttttacaggatttgaatctgcaaaagcgccattaaagtttaaatgatgttaatcagaagcgaatagttgtagtattattatgtttgataacataaaactccttatctttgcactgtgtttttcatggtattagatttaaggttaatgaagattgggtgtctgggatagatacccttctttttttatatatgatatagaccgttttttaaagcttcttcctgaaagaaagatttgctctgtttttttcttccactccttacattttctcttttggggtgacaggcctatgcttgtttttccgtttatatccattgtgggatttttcttgataggatttgttcttcttcaatccaggcagcataaagttcgctcgcttggtcctaaagctttatacacgctttcctaagccttttcgggctgatgattaaggagatttttacggttatgtagtacagactccgacagtggactatacagtcgcttcgaatggactatacagtctattataagcgtctgtatagtccactgtcggagtctgtattaggtggctggaagaaagagcttaatgtaatggaagaaaaagcttagataacgggtaatgagcaggaatgcttcaaaatgtcaataatagaaaggttgcaggctttttaatgaagttgtaatactaccatctcactctcggtgcctattctgaaaggaggtccccataaagataatccgctggaaacatatatatggctgttttcccattggcgatagccgtgactttgttcataaagatggtctgttacccaattcatgggccaaacctgtccatggtgggtgtgtccgctgaactgtaagtcgataccggctgcctgactctctgccagttggtaaggctgatggtccaacagaataaccggtttgcttttatctatacgggccattaacttttgtaatggaagccgtctggcattgctacggtcgtcacgtcctatcagttgtatgccgcagggaagtgtgacaaccgagtcgcgcagtagttgtataggagtattttgtataaattggatacttttgtctatcccgctgatatattcatggtttccggggaccatgtagattcccagtggtgcttttaattccgttagttcttcagccatgttttcagcataaagaggtattacgctgttatcaattaaatcgcctccaattaggattaagtccggattctgtccgttaatcattttcacatattgcttcaaagacgtttttcctgtgccgttgcccaaatgtatatcgctcactgcaactatttttataggacgccgattatcggtcagcggtttggtgagcgtgatgttgacagtatttatcttgggatggcgataattatagtatccatatcccaacaagacgaatgtggccagtaaagaagtcatgaaactctggttgaaagaaatagagcacagtttcaataaatcaaagaaaagtaaaaacaagaccatatataaagtgaatatcagccagcctgtcccgacctcatacattatgtgggataagtaaaacggtatcttcacattgcgacttagcatcgttccgaaaaaggacagtgcagctagccagaataaaacagtcaataaaatcttgattccgtatggaaagccggataatgtttgcaaacctctgtaaaatatgtaggcatttcctccaaggtatgtaaagataagaatgatgaaaaatgtcggcataaagtcaatacattaaatttggattacaaaggtagtccaattcttgataaaagagaaacaaactattgatataaacatgaaaatagtataaattggttgccttaaggatgaagatcacggtggcgtgttatatagaaacaggaggtgctgaagtaatttctgatgtgttttaactgtgccagtacaggatataattttcgtggccgcagatggaacttctgttggtagtgtgggttgatgaaccataattgtctgtcgattatttcgtatccatacttttcagcaagttgttcaaaggtgtctatggtcatgcggcagcgtttgatgtctgataattcttcgatacatgatggtgtttcatggaaacatctgagcagaaaccgatagaatataccgggacataaatggatgaaaggaagagaggagacgaaccggttgtgacaaatttgctgatgtccgccaaatggcatttgccaagacgggaatccccagaatatgatgcctcccttagctagaagaggagagaggcaacggaagaattcttctttgttactgatgtgttcaatgacatcgtgtatcaggatgagctggtaacgggaaactgaagagaagttgaagaaatccatcgtcctgaattctcctttatagccggaggcggcgaagaaggattgtgcctggtgtatgcggctggctgcacggtctatgcctgttaccttgcagtctagttcggcaaaggggagcaggttacctccttctccgcaacctatttccagtatgtgggtagaagagctgagggagataaattgctttacatagtctatatagaaactgcgtgatgtgttcgctagttcgttaaaataacattgtctgtcttgatgtcttttttgcatggctgtctttttatcctatagatacaaggatggacaaaagactgcatgaagtttccttaataattccagcgcactcccaattgtaggttgaaatggaacgggtactcgtcacgtattgtgttgtgcgatagcctgccggtaattcagctatgaatttcatcaaggtttcaataggaatcgaaatcataccttcttcgtccacaggctgcatgtcttcttccagatcatctacagaaaggaaaaagcaggttttctgtttacggagatgatgcaaggaggtagttaccatgatacgggtgacccaggatttgaatccatgcaggtcggtggcatgtagttggtcgatggcggaaaatactttgatgaatccatcatgcatgacgtccaaggccgattcttcgcctacatagcgacagcacactccatacatttggcgggagaagagtctgtatatggtttccaaagcttccctctttccggctttacatccttctattagttctgcgtcattcatttttcttttgtcatgttattatataaagatacaggggagaataaaagactgcataagaacaggagtttttctataaaatagatgtgaaatagaagattattgcctacatttgttaggttaaaacaaaatagatgagaaacatgagaaaacaactttatgcaacattggcttgctttcttctcactccggtcacaacttacgggcagggctggaaactttatgaggaagctgcgaaaggagaatcgtatgccaagtttgactgtgtggcgttgctggacagtacatcggtgtcagtacaaccgacagggcagggatcatttgccgtatgtaaggttatcaaggtgcagactcctaaaggagcagtagctaaccgggtgattaaatatgattatgatccgttgacggcccatgccgagtttaaacgtgtgacgatatatcatgctgacgggcagattgaagaggtggatgtgaagaagacctgtgactatgcggctccggcccgtgctatttattggggagcacgacagattatgatagaagtgggggctttgaaccccggtgatgtcatagattatgaaatagcgaaaaagggatttacatacgctttgctgggagctgttcctgaggatgattcccggttcatacctcccatgcgtggccagttctatgacattgttccattttggagcagtgagcctaccgtgcgtaaagtgtacaaggtcagtattcctatggaaaaagagatgcaatttcaattttatcaaggagaatgtacatcgtccatgcgttatgaagacggacggaaggcttatacttttgctatggaggacatgatgcctttccggcgggagccgaatatggtagatttgtttgatgcagctcctaaactgatgatgtcttctactcctcattggaaagacaagtctttgtggttcaataaggtcaatgaggattatggaagctttgctccactgcccgaagcgcagaagaaagtggacgaactgataaaaggaaagaaaaccgaaatggagaaaatagctgtactgacccattgggtggcggataatatccgttatgcaggtatctctatgggaaaaggagagggctatacgttacatgatactaaaatgaattatacggatcgttgcggcgtgtgtaaagatatagcaggaactttggtttcttttctgcgcatggcggggttcgaggcctatccggccatgacgatggcgggcagtcgtgtcgaaagtattcctgcggatcatttcaatcattgtgtagctgtggtgaaacttgctgatggaacttatatgccgttagaccccacatgggttcctttctgccgtgagttgtggagtagtgccgagcaacagcagaattatctgcccggtgtacctgaaggttccgatctctgtctgactcctgtttctgctccggaaaatcactatgtacgcatcaaggcagacaaccgcttggacgctaatggtactttgcgtggtacatttaccattcaagccgagggacagagtgacagcaatatacgcagcatctttacaagaggttttcagagccagtggcgtgcgactatggaaagacaattgctggctgtttctcctaaagccagattgctgagtgtagattatggcaggaatcctaaagattatcaagctgctcctatccaaatcattttccgctacgagattccggattatgccatgcaaggggagaaggaaatgttgttcaagcctttggttatgaataatctttataatcaggtacgctcttatctacggattgatacagaaatgaaggaacggaagtatggttttaaagacgcctgctcccgtttggtggaattggatgaaaccattcaattgccatcaggctataggctgataaatgggccaaaggaggataccatgcagggaacgggagccgattttgaaggctcacttctacaaaaaggaaaccgggtggtcctgcataatcgtctggctttgaaaaagcgtgtatatgaagcgtcggattgggatagcttccgtaaagcggtggaagctcataaagcatacggtgattatttggtgattaaaaagtaaagcgacatgaaaaagatttattatatatatgtatgcttgggagtgttgttattgacagctcttccggcaaaagcggcttctgaagcagaatttgggaagttagccaagacttatacattacataaagacggtagtcaggaaatgcgggtatataaggaattgactttatttacacatgcagcgatgaatagtttgtatggtgaaagcttcattgtttacaatccggcatatcaggaattgaagatacatgaatcttatactcgccagaaagacgggaagatagtaaagactcccgaaaatgcatttgtagaggttcttcctgctgcggcggctgatgctcctgcctataacggactgaaagagatggtggtggtacatacgggactggagttgggagcgactatttgtttggattactcggttatcacacgtcccggttatttgcccgggctggatgtatatgtgccggtagaggagttatcgcccgtcaaagaatatatctgtagtgtgtcggttcctgaggacaagcctttgaattatgcattgataaacggaaaagctacgccggtagtgaaaaatgagaatggaagtaaagttgttacttggacactgaaaaatattcctgcttattatcctatggaaagtactcctgctttatcaggaaatataccggttattttagcaaatacgtatccgtcgatggccgatgctttgaaagtgctgaaatctcaatttacggcagctcatgaaaaagaggtcatggctttggcacaaaaattattgcaaggaaaaaatgcggatgaaaaggaagctgtcctgatgaactatgtacatggattgggcacgtcccggttgtctttgtccgaaacaggataccggatccgtccggcaactgaagtaatccgtactgcctatggcacggaagcggaaaagataaatctgcttgcaggattgttgcaggcggcaggattacaaggtgaggttaaggttgcttttggcgtaaaagcaccggataattgtttgggattgggcgctatcagccagttgtttctggactctcctgtcatagcgggcatacaggaatatcagcctgtcaatacgttggatggtaagaaagcggttttggaagtgaagaataaaccggtttatgaaacggatacgataacagtcacttctgaaacaggtaaaacgttggcagggggctatcgtctgataacattgcctcgcgctaaaaccggaatagccatgaatggttatggctttggaaatacagaacgtactacgaacctgttgcttcctggtatgacggatgaaacctatatttgcatagtaaatgttccgtcggatatgcaggtatgtactccgcaaaaggcaaaagaaatagtcaatgcggtagggaaattgaaaataaccgtacagactacagaggataagacggaagtaacccgttcgttgcgactgaataaacaatggataactcccaccgattatgcagattttcatcggttgatgtccgaatgggaggatagtcatcatactactctattgctgaaagagaagaagtaatcgggtaaaaattggttgaaatagttgaaaagttggtcatcccttgaaaaaggaaaggccggcttttcttattttccattggaggatttacatttgtggcatttaaaacctataaaatgaatgatatgagtggaaaacatggtatagtttgtatgggcttgttgatgctgctttcttcttgtcacgacgacaagcaggtcactgcttcaggattacaacgtaaggattttcagacagaagtgaatgggcagtataccgatttatttactttgagtaacaaaaaagggatggaggtctgtatcacgaactatggggcgcgagtagtttctatccttgtacccgacaaaaatggaaaaagggaagatgtagtgtgtggattttccacgattggtgagtatatggaacaacggcagaattttggttctacggtaggacgctatataggacgtattctgaatgcgcgtttcacactggacggggtagagcataagctggtccctaacaatgggaagtccggacatatatcacatggggggaatcccggttttgccgatagaatatggaaagtggaacaggcagatacatatacggttcgtctgtcttatctctcccctgatggagaaaatggtttccccggaaacctgaaagtgacgttagtctatagtcttggtgaggatgagaatgcactggatttgacatacgaggcaactacggatgcacccacggtacttaatctttctcatcattctttttttaatatctcgggagactttacaaaaagcgtggaagaccagcaactttgggtagatgcagatcgctttactccatacgatgataagaaatgtgtcacaggagaatatctcccggtggccggtactccccttgatttccgtatgccgcatactatcggagaacgtatagatgcggattatccgcaattgaaggtagtaaacggatacgatcatacttgggaattgaatacgaaaggagatgatacaaggccggctgcttgggtgtatgatccaacaagcgggcgtaagatggagatcttcaccaccgaaccgggaatacaaatctataccggtaatggactgaaaggaaaaatgactggtaaaagggggatagcttatcctttccgttcggcggtatgtttcgaaacgatgcattttcaagatagccccaatcagcctgaattccccagtactgtactccggccgggagaggtttttcatagtcatacggtttataagtttgaataatttgctaatctgtcaatttgctgatgtgctaattaggggtgctatatatgcccacacggttattggtatattagcaaattgacatgtcggcaaattatttttcattttgatgtaacgtttccctacctctatgtgtcatactagtgaacatggaacaaaatagatttgaaatagaggcaaaacgaatgcggccggctttgttaagaatggctatccgttatctggaagactccgatgaggcagaagatgcagtacaagatgtactgttgaaactttggtttcttcgcgaccgtctggaccaatatcgtagcgtggatgcactggctattgttataaccaagcatttgtgtattaatcgtttgcgaggtattcgaatagagaaagtcgatttggagcaaggcatcagcattggtggaggtgaaaaccctgaaatgaaactggtagaggaagagaatatgcaggagatactggaagtaataggtactttacctgacttgcaacagtctattctccgcatgaagcacttggaaggtttcgaagtagaggagatagcccgtctcacaggaagtacgccggtggcggtacgaaccaatttgtcgagagctagaaaaagagtaaaagaacaatttatgatacacagtaaggtatggaattagataagaggaatatagaagaatacattaaccgtttcttggaaggggaaactacgaatgccgaggagcaggctatttatcgtttcttccatacaggggatgtaccttctcatctgatgggatatgctccgatgtttgcctggtatgagggaggtatgcagggagaaccgggtatgttgcagccagacggacagaaggaggttgctggaggaaagaaatcagaaaaggtaccggtggttggaaaagaaagcttttatcagcgtattccaatagctgtctggagtgccggtatagcggcaatgatggtcattgcgctggggttaggttttattttctattcggaaaaccaagcagacggaagtggtgagtggtcgtgctacgaaggtagttatgtggaagtgggaggcaagcgcatttcggatgtgaaacagattatgccttgtattattgaaacattggaaaaggcggaacgggtggagaaactggcccaggaacgtgtggaagaaattcatcgttccgagaaagagatagaagaaaaggaattattggtaagcgaataaaaaacataaaaaataagatatgaaaacaaggtttattttaggaagtgcattggcggctgttttgctgctgtgtggtggaacaggcaaggttatggcccagaagaatattgataaaatggcggcagaattggaaaagcgggatgatgtggctatcaactctgtaacgaaacgtgactctaaaacccgcaaagtggtaaaggtggtgaaaagtttttcgttaaaggatgagaaaataggcgcaaggttgattgaggctttcgagaaggatgaggaatatgcagaaactgccattaaggatatgccgaagggaaggggcaaggcgcagaaagcgaattttacattcatttataagatggataatgagaaacgtacttacacccttaatgtcaatgaaaacggaaatgtaagcatgaccgttattatcagtccgatgaaggatgggaaagaagtgtattctgctgtccttgattcggaatattgggattcgttcaatgagcagatggctgaattggggaataatctaagagattccggtatagaggtgcgccaaatgagccgggaagagatggagaagatgcagaaaactatccgccagtcattgaaaggactggatgcttatgccatagctgaatagataatggcattatttttcacgaacaccagataataaaacactctcttttagttagattacaaaaactttttaattgtcttgcctttccggaagttgtgaaaccaccggagaggctttgttttttaagatgaatctccatgaaaaatcgaattgttttatatctttgcaagtaatataaaaaacacacattaaagaagaaagatgaaaaacgaaattaccggaatgaaactcagactgatagtcatgaacttcttacaatttgccgtatggggggcttatcttacttccatggggacatatttgtttaatattggcttgggtgctaggataggcctgttttacgccatgcaggggattgtttccttgtttatgcctgctgtaatgggaattattgccgacagatgggtgcctgctcaaaaattatatggcttctgtcattttatggctgccgtgtttatggtggctgccgggtggtatggctacgtggatggtgaagcggttaatttcagtactttatttacattttattcttttagtgtagctttttatatgccaacattggcattgacaaattcggtagcctataccgcactggataaagtaaaactggatcctgtcatcgcttttcctcctatccgtatttttggaacgattggtttcatctgttctatgttgctgacggatatcttgggattccaaaataattatatgcagttcttttcttgtgcttgctttggagtgatactggccatttatgcgcttactttgcccgagtgtcctgtaagtcgtagtggagaacagaaatcgctggtagatgctatgggattgcgggcgtttacactgttcaaacagaaaaagatggctgttttctttatattttctatgttgttgggggtttctttacagataaccaacggttttgccaatccgtttctcagcagtttcaggggagttccagagtatgctgatacgtttggagtgaatcatgctaacgcattgatatctttgtctcaggtgtcggaaacgttgtgtattttattaataccttttgtattaaagcatttcggaatcaagcgcgttatgctgatagccatgttggcatgggtacttcgtttcggattgttcggactggggaatccagggccgggtgtctggatgtttgtactgtccatgattgtgtatggtgtggctttcgacttcttcaacatttcaggttcgttgtttgttaacaatgagactgatttatccattcgttccagtgctcagggattgttcgtgattatgacaaatggtattggcgctacagtgggaacgttgggagctcaagctgtggtaaatcgttttgttgatatgaacagcactgctccgcagatggagggatggagtatgacatggtttgtttttgcaggatatgccttggtggttgcggtattgtttgctgtcatattcaagtataagcataatcccaggcaagtttaataaattatttttgaccatatccgatgtaaacaggagtggtagaagggaagttaaaattatggatgaaatagaattgaaggtacatgatatgtcctctacattgcagccggcggatgcatatgcgctggtgttggaagaagtgaatggtaaccgtaagctgcctattattatcggttcgttggaggcgcaggctattaaggtggtaatgatggaatataagatgcccagaccattgacgcacgatctttttctgacagtgaccaaagagttgggggctgctttaaagaaagtgttgatatataaggtaaaggatggagtctattattcctatctgtttttggaaaaggagggtgaggtatttaaaatagactcacgtacttccgatgcgattgcgttggctatgcgttgcggatgtcctgtttatactactaatgagatcatggaaagtgaacagttgcatgaagttgggaatacggcattttctgtcaatgtaaatacagttgatgtggtgatgctgaaagaagcattgtcaaaggctatagaagaagagaattatgagcaggcatcccgtttgcgtgatgagataaaacgacgggaacaagaggaggagaatacgatagtttgatatataaattgaaaaacaagaagaactatgcatgttttttatacccctgatatagcgagtaaccttgaacttccagaagaggaagcaggacattgtttacgggttttgcgtctttccataggcgatgagataatgttgactgatggaaaaggttgtttttacaaggctgtaatcagtgctgcaagcggtaaacgttgccaagtgaaggtaacggaaacgattccgcaggaaaaagggtggaacgggtggttgcatattgccatggctcccactaaaaatatggatcgtactgaatggtttacagagaaagcgactgaaataggctttgatgaactgtctttcttgaactgccgttattccgagcggaaagtaatcaagaaagaacgtattgaaaaaattctggtatcggcagtgaaacaatcgttaaaggcgactatgccggtactgaatgaaatgacggactttaataagtttgtttcacgggattttaaagggcagaagttcatcgcccattgctatgaaggggaaaaacttttgttgaaagatatattgcgttccggagaagatgctttggtgatgataggtccggaaggggattttagcgaggaagaagtggctaaggctatagcggcaggttttcagcctgttagtttgggaaagtcccgtcttcgcacggaaacagccgcattggtagcctgtcatacactgaatttattaaaccaaaaataagaatatgagaaaaggtatttggggatttgcattggtggcgatcatgctgcttatggcttcctgttcgtctaaaagtgaatatgccaatgctattcctaaggatgcggcaatggtcatgtcattcgatttcaaaacaatggcagagaagagtggcataaacggtaaagggggagaaaaggtggtagccaaactgacggacgcattaaaaagcggtctggaaggagaggcctataaaactgccgagaagattattaaaagcccgtctgaatccggcttgtcttttactgataaagtatatatgttcattactcctcattctaatgcttttgctttattggcaaaagtagatgatgaaggtaaagtggaagatttgctggaggcgttgaaggaggagcagatatgtacggaattgaaaagcgaaagcggatgtacatggacacagatgggtacggcgctgtgcgcttttaataagggcactttcctgttgatgggaagtaataaaggagatgctctcagcttgaaaggaagtttgctttcattgatgcgccaggatgctgaaaacagctatgtaaagaccacagactttggtaagttggcctcgtcgaagggtgaaattgtcactgtgatgaatatgtcatttattcctaatgatatcatgcagatgcgaatgggaatgcctgcctatttgaaattggaagatatcaaatatctggtttccgctactttcgaaaaaggtaaaattgtagtgaagatggaaacattgattgaaaataaggatttgattgctatgtatgaaaagcagtcggctgtttccgcactcatcaaaggagcttatttggagtatttccctgctaatatgttggtttgggcaggtggtaatatcgatggaaaaggaatttatgatttactttgcgaaaatcctaccatcaagcaagcgttggataatccgatgttgccaatagatattgaaggtatattctcttctattcatggggatgttgctgttggctatagttctttgtcaaataatgacttgctgatttatgctgatgtaacgaataaagactttttgcagtccttcgaagacctgagacctttgttggctatgaccggtgggcagatgcaattgaactctacgggcaaagaccaatatgagttccgtatgtatcgccagagcatttggtttggtgtgaaggataatctgctttatatctcgaacaatgaaagactggcagatgaggcaggccgccgttacggagtttctttgcagaatactccttgggccggagaagtggtgaaaaaccgtttctttatggcgttcaatgcggcgcagttggtgaaggacgttcaggagaatcctcggttaacccgtatgctgggtagtgatgccgccgtgtttaatgctattttgggatcttgcgactatgtggatgtgatggctcccgattggagaagcggtcgaataaatattgttatgaaagataaagaagtcaacgtgctacagttgatcgtacatggattagagaacttatgaatactatagaattacaacggacccttcctgctgtttttgcagggagggattctattatatccgatgtctggcatcagttgttgaccctgcaacgtggggaagcctatttggtggaggcagcatccggcactgggaaatcatcgctttgcagctacatatacggatatcgtaacgactatcaaggtatcatttgttttggcgagaaaaacatccgtagtctttcggtgcatgactgggtggagattcggaaacgttccatcagcatgttgtttcaggaattgcgtttgttcacggagctgacagcgtgggagaatgtgcagttgaagaattcgttgaccggatttaaatctaaaaaagaaatcaaggcttggtttgaacagttcggtattgccgataaatgggatacaccggtagctaaaatgtctttcgggcaacagcagcgtgtggcgttggtccgcgcactttgtcaacctttcgattttatctttctagatgaacctatcagccatttggatgaagaaaacggacggattatgtcccggatattggtggaggaagcggatagacagggggcaggtatcattgtgacctctatcggcaagcatttggaattgaactacacaaaaacgttgaaactatgaggttggtttggaaattattacgtcagcatatcagtttcccacaattggcgggttttttctttgccaatctgtgcggcatggtcattgtgttgctgagtgcccagttttataaagatgtgttgcctgtttttacggaaggtgacagtttcatgaagaaagactatgtgatagtaagcaaaaaggtaagtacattgggctcctttgtcggaaaaagcaagactttttccgaacaagacattgctgaaatcagcgaacagccgtttaccaaaggagtaggggcttttatgccttcccaatttaaagtgtcggcaggcatggggatggagaacgtggggttgcacatgtctacagccatgttctttgagtctgtacccgatgagtatgtggatgtgaacttggataaatgggagtttgatgaaaatgaacgggttgttcctatcattattccccgtaattatctgaatctgtataactttggttttgcacaaagccggagcctgccgcaattgtcggaaggggtgatgggtatggttaatttggatatacgtattactggtgcagggcatacggaaaactttaaaggaaaaatagcaggtttctccaatcgcctgaatacgattcttgttccggaaacatttatggcgtgggctaacaatgagtttgctccggggcagaaaagcgaaccgtcacgactgattgtagaagtgaacaatcctacggacgaccgtattgccaagttctttaaagacaagggatatgatacagaagatgacaagttggatgcgggaaagactacctggttcttgaaagtgattgtaggaattgtgctttctgtaggtttgcttatcagtgtactctctttctatattttgatgctcagtatttacttgttactgcagaagaatacgtctaagttggagaatctgttattgataggttacagtccggctaaggtggcgcttccctatcaaatgctgacattgggcctcaatgcagtagtgttgtttttatcggtgggaattgtgatctatgtgcggaatagctatatggatatgatagaaaagttatttccacagttggaagaaggaaatctgggaccagccatggttataggtattttgctttttgtgggtgtatctttgtttaatataatagcagtacgtcgtaaagtggcatctatatggatgcataaaggttgataatagttatggtatctcagacagaatttacgcttcgtccccgtactaggggatttcacctgattactgatgaagtggtgcgcaatttgcctccacttccccaaataggtttgctttatttgttcatcaaacataccagtgcggcattaagtatcaatgaaaatgctgatccggatgttcgtacggatatggaatctatttttaatcacttgataaaggaacgcgaaccctattacgaacatactttggaaggttgggatgatatgcctgcccatgcaaagtcaaccattataggagctagtcttactattcctattacagatggtcgactgaatatgggtatttggcagggaatttacctttgtgagttccgcaaccatggaggcggtcgcaagattgtggctactgtaatgggggaataactctttcagatattcatccgggttattatttatttaaaaaaatagattaatttcactttaatcagaactctttttttaactttgtaccaattcttgaaaacagatgaatattcatttgaaaacaagaagggacatatataattaagagcgtttaaaatattaccttgtcttagaaaatccccaattttcaaagctgcacaagtgtaatacaacaagcgctcacgtcttgtgtttatactcctttacaggattagtatattcataaagacgtgggacactgttgttattatttgtgcagctggtatggggatacctctaaggcagataaaatattaagcaggtcccacgtctctttttatgtttgtaccataaaaatgaatggataaaactagcctgagtgatgaaaattattgtttggaattcgcaggataaatgtgtggctgattatcataggttgataagaggttgcgatgtattgtgcctgttggattgcgggcagtggacggttccgatgtatgcgcttcagatacagaagggtctgtttcattggaaagttgagcatgaaggtctttcctatgatatattttattgcttggagaaggtggcgtttgtatgtcgggatggtttgtatagtggagagtctgttctatatagcattcattctaatataggatctttgataggtattcgtttgcaggatgatttttggttatttgcacaccatgagcctaatctggttaatgcctatcatataggtgagttttatttacgtgaaatctcggaccgtttcagaaaagcggcgtttatagccgattttaaaaaaaagtcttattcttgggtgcaggaaacggtaggtaagttatattgcatcgctctacccgaaggatattatccacatactgttaattatttattcactatccatgtggcctgtacagatttatatctgttggaaggctatagcgagacctccaatcagcctactttctttgaattggatatttaatgtccagattagaacctgtcttactgaaagaaatcaattaaagttcggtgaaactgatgacaatgctgatgaaaattaaacgagttcttataatttcttgtttttcctttgataataaaagaattagtgtatatttgcatgtgaacaattacattttctaaggaaatcatcttatgggcagagaatttatatttgaccggttttcacagcaagctctccagaccttgcaccggtatcgtgccgttatgttcagtcctacgatgctcatgtctttagttgttacctatgattttttttaatccttaattcttacacattaacatgagtttactatggacaacagaccgactatcgccgaagtacaagaatgggtactgaagctttataacacgtgtgaacaaaccatcactagtgaggaacgtaaagaacagcataaatatgccgttatggtacaacggccacaggacaaaaagttcttggtgaagatgctggacgaatcttctcaaattcgtgatcgtaagaaattggcagaacgtatcaagaagctgatagaccgttatggtgtacctgagttcttgaataagcgtgatgctttcctttttaagatgtaccaggcttttggtcatcattttgatttcatagccataccaatcataaagaagcgtcttcgtatggatacttctaaagtaattctgaacgaagcgcgtcctaaattgacagatcatctggctacccgtttcaaacaaaagattggtcagaacgtgaatttgttaggcgaggtcgttttaggaaacggagaagcggatcatcgttatttccactatctggaagccttggaagctcctgatatcaattatatttctgtgaaaatatcgggtatctacgcgcagactcatgcgctgaattatgaagaaagctttccggagctggtgaaacgtatgtgtgcactgtatcagaaagcaattgactttccttacgtggatgagaacggtgtaaaacactccaagtttgtcaatctggatatggaggagtataaggacgctcactttacattacgcttgtttaaagaagtgttgagcagaccggagtttaaaaactattcggcaggcatcgttgtgcaggcttatcttcccgatgcatacgaatttcagactgaattattagaatttgccaaagcgcgtgtggctgatgggggtgcaccattaaagatgcgactggtgaaaggctgtaatttggaaatggaaacggttatttcttcccttcgtggctggcctaatcctgtaaggacatcgaaaactgaagtggatgccaattatttgcatattctggaacgtgctttattacccgaaaacgcaaaggcgttgcatgtgggggttgcttctcataatttgttcactattgcatacgcctatctgttgagtcagaagctgggaagcgcggagtacatgacttttgagatgctggaaggtatggctgaccatgtatggcgcgctcaatcccaattgggaaatcatgtgattctatatgcgccggtggtaaaagatgagcatttcctgaatgcagtatcttacttggtccgtcgtatggatgaaaatacggctccggacaacttcctgacccattcgttcaatttgaaaccgggtacggatacttggcgtttcttacagaaccagtttgaggaagcttataagatgaaagatgttattacacatactcctgcccgtacacaaaaccgcttgcatcgttatactcccgttccaccagctgatgtaatgaagaatgaacctgatactgattttgatttggctcagaaccaggaatgggttcggaacatttttgcgaagtggaagaagtcgccgacggattcacctgaaattattcctttgcagataggagctgaaacggtggtttgtgagaaacgccataaatatatggaccgttgccaggatgatgaagtttgtgtatgcgaaatgtcacaagctgatgccggacaggtgatgaaaattttggatatagccgaaaaagatcctgccggatggagaaagactacattgcaggaacggcataaaataatgtatgaagctgccaacagactgggtgagatgcgtggtgatttgataggttgtatgtgtgccgtgacagggaagacagtagtggaaggggatgtggaggtgtcggagggtatcgattatgctcgtttttatagcactagcatgaagcagtttgcagaactaccggatgtggacattgctcctaaagggactattttggttatttctccgtggaacttcccgtgtgctatacctattggtggtattgtggcaggactagtaggaggaaatactgtaattttgaaaccggcgactgttgctgcccctgtggcatggttgtttgccaaggcattttgggatgcaggtgtgcctaaagaggctttgcaggttatcattacagaccgtgaggcattaaaggtattaactacggctccggctgtcaaacatattattctgacaggagggacagatactgctcaaaatattgcacgcagtaatccggctactccattgtcggcagaaaccggtggtaagaatgcaattatcttgacggcttccggtgaccgtgaccatgctattatgaatattgtggcttctgcttttggcaatgccggccaaaaatgttccgcatgttctttattgctggtagaacgctcagtttatgaggacaagaactttcaggataagttaaaagatgccgcaactagtatgaaggtgggtagtgtatggaatccagggaatgtggtaggtccgatgattaccaataagaatgataaattattgaaagctttggaattggaaaaaggggagtcctggctggttccacctcgttttcttgataagcataaatatgtattggctcctacagtgaagtgggggggacgtcccggtaactattcattcagaaccgaattattcggtccgatgctgagtgtggtttgtattgaaaatttgcagcaaggcatcaattgggtaaacagtttggattatggtttgacttcaggcttacagagtctggatgaaggtgaacagaaattatggaaagattcaattatggcaggtaatctttacatcaatcgtggtataacgggggccattgtaaatcgtcagccgttcggtggaatgaaattgtcagcttttggtggcggtgtgaaagcgggtggtcctaactattgtgcttgttttgtaaagattacagataaactaggcagtaccactgactatacacaaagttatgtgaaggcatacgagcaggaatttgcgcatgcgcgtgatgtcaataatctgtatggcgaacaaaatgcattccgctatctgcctttaaagaatatggttttgcgtcttttcccgggagataacaatgaagatgcaaagatgattgctttggctgccagaatttgtcatactccattgagcattagttttgagcccggtgatgatcgtacagctgcattggcttccttgggatgtcctttaaaagaagaagcgttggccggattcctgaaatcaatgaagaactatgagcgtatccgtacttgtggggcggatattccgatggaaatgtatgaggaagctgcacgtattgataagtatattgctacagctaaaccggtgaaagatggacgtgtggaattgattcattacatcaaagagcaaagtatttcatttgaatatcatcgttatggtagtatcttggaggtgccgtcggtagaatgatgaaatacttttattagtatgtcttttgtataactttattaggagtctcgatttgtatgggactcctaattatgttttagaaattattattagaattatttggtggagaagaatgaatgtgtatatgttcagacgtgttttatcaatagaggcaataaaaagggtaaataatcttttaattcaatacgtaattgttttagtgcctgttgaatgcggtagtctatggttttaggtgatactcctaaaatttctgctatttctttataactcatatttttaaagcgatgcattacgaaagcttctttataggattcaggaagtgtttctactgcttcttggatacgtatagtcagttcttctataagataaaaattagtgtcatctattagggattgcatctcttcataaaaatagttttcgacccggctttttacttcttgctgtttgatacggtttatagcacgatgatgtacaatagaaaataaataattacttaatgaagactgaatgactagcatatctttattttcccaaagccacagcatggcatcttgtacacattcttctgcatcttctaattctacgaatttgtttccgtatgcacataacatgggatagtatttcctaaaaagtgtatcaaatgctttctcattgccatttttgatggctaataatagggattggtcttcatagttatactccgttttcattatttaaaggttggtttgtgtgcaaatataatcttttaaaactaaaaaaatatattgtatttcagtaattctattctatggaatactattttagaggaagtcttgattaaagtcgtttgtagtgtgcccttgggtattatgtatgcccaaagggcacataggaaatatatttaattattttttactttgaagcataatactatcggttcgtttttgaggttacggggtaagaatacctttgtctttggtatattttatatttttattgccttgtagtggaatcattttaccgttaggaatattgccggcccatttattgtttctggaagttcctctccttctgataaagcgtaaatagcatataaagtttttccgtttttgtctgcagtgaaccatatattctcattgttatatataggagttgtacgagtggcataaatggcttttccgtttcatgtaaacgttttattacttcgtctttgatggcgtcagacctactcctaataataaacaacctcctttggcaatgattcctattaaaatattaataattttttgtggtgatttaaagggagcattaggtgtccatccccaatcattgcttagtggtggacaactttcccaaggatagttaagctgtgtttcggagtttaaaagaagatatcaccgaaagccagacagatatccgcattcagaaaagtgatttgtttgaaattcctctatcattgaatactcttcagatagacaataaacttattatatataacaagatggaaaaagaaactgacttctttttattgaaggattgcaaaaggggagctttcatgacaaaagcgtcagatcattcttcaaaaactcctttatataaattatctgatcatgtctataaggtatttttccgggatttagctttacaagatacattggcagaccggattgccgatttgatgaataggatcggcttaagtcagatttcttttgatagattggagggatgttcctataccgggcatgacgaatacgctatttcccgctttgcgccccgttgttatactcagtttaattataattaccttaattccgcaacactattacaaatataactttttaagtacctgagcaacaaaaagttgctcaggaatttgccatgtcagatttttcacctatcttagtgttgcaaatcaaaatatgtatcaaacccgacagacatggcaaaggtagcaattaaatccgagaaactcactccttttggaggaatattttcaataatggagcaatttgactccagactctcatctgtaatcgactcaaccctcggtatgagatgcaggctgtatggttatcaatacagcgaaatcatccgttcgcttatgagcgtttatttttgtggcggctcatgcatcgaggatgtcaccactcatctgatgtaccacctttcgcttcatccgacacttcgcacatgcagtgccgacacgattcttagagccataaaggaactgacccaggataacatttcctacacatccgacactggcaagacctacgacttcaacacggcagacaagctgaatacactgctcctcaattgcctattgtccacagggcagctgaaagagggcgaggggtatgacgttgacttcgaccaccagttcatagaggctgagaagtttgatgcgaagcctacatacaagaagttccttggttatcgccctggcgtggcggttattggcaacttgattgtcggcattgagaacagcgacggcaacacaaatgtccgtttccaccagaaggacacgctgaagaggttctttgaaaggtttgaacaaaacaagcttattatcaaccgtttcagagctgattgcggctcgtgttctgaagagatagtggaagagattgctaaacactgcaagaccttctatatccgtgctaaccgatgcagttcgctctacaatgacatctttgccctcagaggttggaagaaagtggaattgggcggcattgagtttgagctggcctccattctcatcgagaaatggaaagggaaggcataccgtcttgtgattcaaagacagaagcggatagacggcgaactcgacctgtgggaaggagaatacacctaccgctgcatccttacaaatgactacgagtcttccgagaaagagattgtcgaattctataacctccgtggagggaaggaacgcatcttcgatgatatgaataacggattcggctggaacaggcttccaaaatcctttatgggagaaaacacggtgtttcttctgcttatggcactcatacgcaacttctataaattcatcatggcgaggcttgacgtgaagaggttcggactcaaagcaacaagccgcatcaagacgtttgtctttaagttcatctctgtgccagccaaatgggtcaggacatcaaggaagtatgtgctgaatatctattcatgcaacaatgcttatgccaatgtgttccagaatgactttggataacaccgacaacttatagtcgtgattttgcgtattgcctcaagtcgcatggtggggtaaggggcatttatatgtctttatggtgacattcgatgcactgtgccccctttttactaacgatgcagattcttttcgcttctgtatcatattaggcgcgtagttgcggatttgaggaattaataaatgacgccagtcgtttgaatcataatttatggcgtattcacacaagaatgaattgaggtgagccttggggagaagttatgcgtacggaacaaatggctaataaaattaagaaccaaaatttttttcaaaggaatctttttccacgtatgtttggatggtttcttattcgattggtcgaccgggaatttgaatgttctactttggaggatgtggaggggctttgtccgaggcggcaggttttgatgccggttatgattaataccactatcttaaatcggtatgggcaaatagaccgattgctacaagctatcaaacattaggatatactacatgaggcttaagtcttcaccgaaaaacaaaaacagcgtttgaaagatctgcagttcgaatggcatttgcaaaaggtggatgagaagaactatcagctctatcttttgtttgtgtctaaacttattattgtaatttaacagaacttcagccaggtcagccggaaggagctgactggatatgagaaaataaatatccggggcgatgtaaaattcaagtaaaactggaaggagaagcgactgtttccaatctgtcgtttactacttcggctggtattgttaaatttccgtgtgagttggagggtggacaatatctgttatatgatttcgatggaaatgctgctataactgataaaaaatataatgtaatagaggtgatcggtgtagagggtgcattttatctttccgaaacttcttctctggtatctttttcttgtgaactagaagtgggagaggctcctgaagtagttgtacggtatgtaacttgtgaaaatcctgaaaaagtttctctatgaaaatatatttttaaaaataaatgcatatttgtttaggaatgtgtttttctcgcttgccatataagtagaaggacttaaaaacatacgtatggagtataatgaaacgaatatagaattgttacttccccgttattgtgagggtattgtaacggtagaagagcagcgactggtaaaagattggatgaaggagtctgaagaaaatcgccggatagtaaagcagatggaaatactttatttagcggctgataccgttcatgtaattaataatgtaaatacagaaaaggctttagttaaggtaaaaggtaaaaagactgaaagaaggaaggtggcttggtgggagtgggcacagcgtgttgctgccgtgttatttctcccactgcttgctacttttttggtagaacattatggtggaaaggatgcagatgtacaaatgttggaagctaggacaaacccgggaatgactacttcagtagtgttacccgatagtacggtggtttttttgaattcagaatcctctttgcgatatccttcttcttttaagaatagcaaggagagaaaagttgagttgaagggggaagggtattttgaagtaactaaagatgtggagaaacattttattgtgtctacggttcaccgttcacaggtagaggtgttaggaaccagttttaatatagaggcttacgaagagtctcctgaggtatctactactttaatcaaaggtaaagtcaacttcagtttccaagaaggtgtccgcaaaaaacagattgtgttaaaccccggtcagaaagttgtgtatgattcaaaaaaaggtacagcacgtttacttgagacttccggtgaaacggaaacttcatggaaggacggcaagattatttttgataatacttctttgaaggatgctttacggattttagaaaagcgatataatgtggtgttcattcagaaaaatcctgcacgtaaggctgcttttaccgggacttttaccagtcagcgtttggagcgtattctggaatactttaaattatcttccaatatacactggaaatatgtagacggtaaggatgcgtcgcaaaaaaagacccatatagagatttattaatcaaataaccttaaattgaatataatatgaaagaactatcaccttaaagtaacaaaaaacatacgggaaaatattggcgtatcttcccgtatggaaaatcggtttccaaattaaagcttgtttggcgacaagcttaatcaactaattttaaaacttaagtcattacaaaagtatgaaaaataattgtagtatccaattttcgaggataccaaatcgtctatggctctcctcgaagaaaatcccaagaactatgaaactatttactcttttctttgcttgttccctaggactggctcatgcatccgaatcgtatgcgcagaaggctatagtcaatgtggaggtacagaataagactgtaggggaaattttgaaagaaattgagaaacaatcagaatttgatttcttctttgataatacgcttattgatttaaatcgtcgtgtatcagtcacttcccgtaacggtgatatctttaaggtgctggagaaggtatttaaaggtacaaatgtgaaatattccattttggataagaagattgtcttgactactaatgctgacaatacacagactgtgcagcagattacttttaaagtaatcggaaaagtagtggacaatatgggagaaagcgtgatcggggctactgtgttggaacaagggactacaaacggtactgtgactgatatggatggaaactttgaattggtggtttctaataaggaagttactttagagatttcatatataggttatagtaagtctgttgtgaaatcaaaagtaggtgtccctgtcactgtgactttaaaagaagatacagaagtgttggatgaagtggtagtagtagggtatggaacacagaaaaaagtgaatttgacaggtgctgtcagtcaagtaggggaaaaggctttagaatctcgtcctgtacaaaatgtatctcaggctttacagggattagtaccgggaatgacctttggggttgacgctaaaggtggacagttgaataatactccttccgtatctattcgtggtgcagggacaatcggtaaaggctccactggttctccattgattttgatagatggtgtagagggtaatatgaacttgcttaatccgttggatattgaaagcatttctgtattgaaagatgcatcggcttcttctatttatggttctcgcgctccgtttggggttattttgattacaactaagcaaggaaagactggtaaaccggtagtaagctataatactaatattcgttttaatagtcctcttactgattatgatatgatggattcctatcgcttcatgcattattataatgatgcacgtactaatggtggacaggcagcttattttagtgatgagcaaatagctaatgttttggcttatcagcgtggagaagtaggaaaaattattccggttacaacttcaaatacatatacacacaactgggcaaatgctaataccgactggtatgatgtatttttcaaagaccatgccatgtctcaggaacacagcttgagcttgagtggtggtacggaacgtttttcttattatttgtccggcaattttatggatcaggaaggcttgttgaattatgctgacgaaagctattatcgttattctgtaaatgggaaaatcaatgcgaaaataaacaagaacataagtctctcttataataccaaatggtttcgtactaattatgaagctccttcttatttgaatcagttatttttccaccagataatgcgtaaatggcctaatgcgtttgttactgacccacaaggatattgggcggataacagcgagattataccattaaaagaaggaggacgaatgaaggaagatttggatcagaacttccaacaattgcagttggatgtcactccattgcctggatggaatattcacttacagggtaatatgcgtattacaactaattttactcatactgacagacaagctgtttatgcccatgacgccaatggagaaccttatgctatagctatcactaatgcgacgcagccaggtcagtccagagtaattgaaaaaggaacaaagaatgaattttatacagtcaatcttttctcggattactctcgccagttgggtgaccattatttcaaagtaatgggtggatttaatgccgagcatcaaaatgtgaggactttaagtgctcagcgtgatggcattattgtaccagatttacctacaattgatacttctactgagcaggacgtagcggggggcggttataaccattgggctactgccggtttctttgggcgcttgaattataattataaggagaaatatttgctggaagtaaatggacgttatgatggaacttcccgttttatgaaagatcagcgttggaactttttcccctcattttctttaggttggaatgtggccagagaaaatttttggaaaccgctggaatcagttgtcaatcaatttaaactgagaggctcttggggtgaattgggaaatcaaaatacatcgaatttgtacccattctatgaaatcttacccgtgaaaagcaattccggtaattggctggtgaatggaggaaaaacaaatacggcagatattccttcattggttagtacattattgacatgggaacgtgtgcgttcttttaatgtaggttttgattttggtgctttctctaatagattgacaggttcttttgactattttgtacgcaagactgtcgatatggtaggtcctgctccacaattacccttagttttgggtattgctcctgctatagtaaataatgctgatatgaagtcttatggttttgaaatagaactttcatggcgcgatagaataggagaagtagattatggagtgaagtttaatttggctgatgcccagcaaaaagtggtgaaatatcccaatactacaaatgctttcagtgactggtatgcaggaaaaatgagtggagaaatttgggggtatacttcattaggtattgcaaaaacagatgaagaaatgaaagagcatttggcatctttacctaatggtggccaaaatcaattaggaaacaaatggggtgccggtgatattatgtatgctgatataaatggtgacggcaaagtagatggtggtaaaggtacattagctgatccgggcgatcaaaggattattggtaattctactccccgttataattttggattggttttggatgcttcttataaaggatttgatgtttctatcttctttcagggagtaggtaaaagagattatgctccgattgtaggaactaatggtgctgttttttggggagctgtaaataatatctggcaatcaatggcgatggaagaacattttgattatttccgtcctgagggccatcctatgggagctaatctgaacgggtattatccgagaccggactttaccagcaacaagaatcatcaggtacaaactcgttatctgcaagatgcgtcttatatccgtttgaagaatttacagattggttatacattacctaaacaatggattaataaattgcacattaatagatgccgtgtatatgtgtctggtgataatttgtggactggaaccagcctggccagtatgtttgatcctgaaacactagctgccggagattggggatcaggaaagacttatccattatctaaagtgatatcttttggcttgaatgttaatttttaaatagaaatacaatatgtcttacataaaaaatacagtagcttctgtagccatgttatttacctcggtggtattgacatcctgcaatgattttctagattgtgaaccgttggataaaataaccccggatgcttattttaattcagaaagtgatttggctgcctattctattcaacaatataaattcccatcctatcttaattttgatatctctttagtaaaaactgataacaattcggatgaccaggccgcaacggatgcttctaccgcgttgtgggtaccgggagaaaaacgtactcctgctgataaaggagcatgggattttacagaaatccgtaaagcgaattatttcttccaacaagtattacccaagtatgaggccggaagtataaaaggcgatggagtaatgataaaacattacattggagaaatgtattttttgcgtgcctaccagtatttcaataaattggtaagtctcggtgattttcctattgtaacggaagtattacctgatgaaacagaagtgttgaaggaggaaagtaaaagacagcctcgtaataaagtggctcgttttattatagaggatttagatagagctattgaattgatgtcattgactaccgataatggtaagaatagattgacaaaaaatgtggcattgttgtttaagtctcgtgtagctttgtttgaggctacctggttgaaataccataaaggtacagaccgtgtgccgggtggtccgggatggccaggagcacagcaagaatataatgctggcttttctattgatatagacaaggaagtagattggtttttggaacaggcaatggatgcttctgctcaagtagccgatcgtatttcattgacaaaaaataccggtatatataatccggactcgaatccttataactggaatccttattttgaaatgttttcggctgttgatatggaaccgatagatgaagtcttgttttggagagcatacagttctgtgcagggtgttactcatagtgtaagttcttatctttgcaaaggaggaggggatttaggatatactcgtagtttagtagatgcatgtttaatgaagaatggattgcctatttatgcgccaaattctggctatgctggtgacgtgacgattgaaaatgttaaaaaagacagagatgaccgtttacagttatttatgggtgctcctagtgattgttcaaggcttgatccccatatgagacatataaatatcctaagatattggagcagaccaatgatagatgcccgacaggttatacggttcgtaaattcttgacttatgatccagctcaagttgtaatcggttctggtgcagtcaatacgtatggatgtcttcttttcagatctgttgaagctaacttgaattatattgaagcttgctatgaaaaaaatggaagcttggatccaaaagcgataaagtattggaaggagattcgtagtcgtgcaggtgtgtctgataatatcgatatgacaattgctgctaccgatttgtctaaagaaaatgattgggctaagtattctgccggtcagttagtagaccccaccttatataatattcgtcgtgaaagacgcgtagaactaatgagtgaaggtacccgtatgcgtgatttaaaacgttggcgtgctttggaccaagtagaaaattatcaagttgaaggatttaatttatggggtggcgaactggaaaaattgtatgttgatgaagctggtaatagtttgttgattccagaaggtacttcagataagcaacctaatgtatccaacaaagaaaacagcagttatttgcgtgttaatcagattgtaaaaaagaataacttgttatacgatggttatacctggataccagccaattacttagagcctatttctgctatcaactttacacttacctcttcaaatcctgatgacttggaaagttcaacgatttatcaaaatccgggttggagtaaaatagctaatgaaccggctataggatattaatataaaaaagagaatcatttttaaggagaagatataaaagagagtgtgtaaggaacccttctcttttatgtcttttctgtttgtgtatgtaacatcttttattttagataagcacagttgtattctgtaaataccatgaatatgaaaaaactgattatgttgtatttctttcttgccggaggaatagcggcaaatacgaaaaatatagattatacttatttgaaaatgcagtctgctccttttgaggtagatgacgattacctctccaaacatgatatcgtttatttttcacctacgcaactggaggcggaaggctttccgatgggtaatggtgatataggcggcatggtgtggaatcatgacaatggcatcgaattgcaaatcaataaaaatgatttgtggacaaaggcacaaccagaagaatacggaatgtcattgttgaagcatgcggctcgtctgaagatcgattttggtgcaccggtattcagttggatgcatttggaagagtttgaggggcggttatcgctggcaaatgccgagaatacatatcgtgcggttacgggttattctgctacaactattcgtacttggttggcgcaagatcgtaatgtatggatagtggaatgtgaaaatatgcctgatcctgaaatgttgggaaatcattcggtagctacggtttcgttggaaagactggggagccgttcctttaccggatggtatggaggttggtttgcgaagaacccttcagtggggcttggtaagatgcgtgcaatggctgatgctcgcgaaatgatattggaagaaacggatggtggactgcactttgctgtagcttgcagggtggtagagtcgtccgaggaaccggaaacggtgaatatgcgtcgtgccgaatggcggacaaataaatgtaaattcacaattatggtcagtgtagcgactgatcgcgaagataaggatccggtaaatgcagcaaagaaattacttgatgaggcagaagcgaagggggtagatgagttgcgtcgcgagaaagatgagtggtatcgcaatttctggtccaattcgtttgtgaagttgggtgatgattatttggagaatatctattacttgcatcgctatctgatgtctgctggttcgcgaggtgagtttccgttggcttttaatgggggactttggcgttggaaccgtgatgtacttaattgggggacaccgcatcattggaaccagcagcaggaatattggggattgtgtgcgcaaaacgattggcggctgatgaaaccttatctcgacacttacttcaagatgataccgtttgctgagaaactggcaaaggagtatggagcggagcatgatgcattgctcattaccgaagcgcataatttcaacggtgtacaatggggaaaggacaaacgctatctgaggaacaattttactcctgcttcacagatagcttctctcttttgggattattacgaatttacgggagacgaggaattcttgaaagaaagggcatatacgtttatgaagaaagcttctcatttttatttagacaggttggaatgggatgaagaaaaaaatgaatattttttgaaagcttctttgtatgagtcggcccctatcgcttatgtgaagaatcctatcagtgaccgcaattgcatcgaaaggcttttcaaggattgtatccgtgcggcggaaatattgaacgtagacaaagatgaggtgaaacagtggcgtcacgtactcaatcatttatgggaaagaggctatcagcagtttggtgaatgtggcgaagtaatctctcctgccgaggagtattatacggaaaagcgttattctccatggatttggggtaacggtggtgccgtagcttttccggcagggctgattggtattgatgataaagacactcgcttgggaaaagctgttgtgaatctgttgaaacacgatgacgagtgtaacgcgcattatccttatccgcagatagccgctcgaatgggagaaggagatgtggccttgaagtatatatggaacggggtgaatgtacatcagatgtatccacaaggattgatgcacaatgtgaccggttatcctgacaatatttacgatcttgcctctgtgcacaatctgttgaaagacacgtatatgatacgctcacatgatttctttcagtgcggtatggaacccatgagcaattattgcacgggcataaatgaaatgatgctccaaagcaacgaggagaaaatcagagtgttccctgctgtgcctgctgcatgggattctattcctatggcatttattttgttggcaagaggggcatttctcgtttctgcaagtaggaataattcggctgaggttacacaagtaggtgtgaagagtttaaaagggaatctttgtcgattacagaatccttggggtgacaagaaatgtgaagtgttgagatgcagagatggcaggaaagtttccgtaaagacaggaggggatggtgtattggctttctctacccaaacaggtgaagagtatgttgttcggctcattggtacggaaactttggttaaagaagtgtattttggcaagcctaatatgaaggtgaaacaattgggaaaaagaagattgggaaaggttagtggctggaatgattttcaatgtggaggtgaaaaatgaatctttacagtgaaagtgaaggctgaatatgattatgcacagaaaaataaagctaattatttgttgaatattgctcttcgcggagatgggtctattcatcctgctgaccaatccactttgcaaggttttgctgatctaaaagattgatagtatacgtgactggttttgaacagatagattcttctttcttcctttcatctacttttgaaaacgccctgctgacaggcgttccggtagtgacaggacttcccgtcatcccctttcagtttcctccactctgtatcttcactccttcctgtgaagggaggagaatctacagatgaaacgggaatgaggggagatcttacagtttttaaccaattgataactagtgtgttttaaatgaaatgacagaatgagaggagaaaagtgaacacctgcatagtgagaggatagtgtaatgaaccgacttggctggtttgccggacatgataggcttgtccgtcggaccagctaagctggttcatgaaacatgccggccttttcatcaagacatgctgaccttttaagtaaaggtgctggcatttaccaaaaacataaggacattttaaaaaaacgaccggttcttttgaagtaaacgaccaaagcaacacatccggtaacattagtaacatgtgacctgtcacgttactgacgtatgagtctacacgtatgtatgtgtcgggctgtacatacggtagcgtatgcctatatatacgtatgtactgtgtatcaagttctaccgcaacttgtactaagatgcactatatcctgtaccaagattcgccataacttgtgccaagttccgctacctttgctgaaaatggtaaaggcaacttgcaggataacaagaatagtttttcaggagaaatcccggcaaaaaagtggaatcagtcctttcgacagcttcagccagaaaagcagaggagaattctgctcacttgaaagacgtgcagaagaaggctaagccgcattccttgatgcaggaagtgaccacctttctcacctcccactaccacttctgtttcaatgtactgaccgaggtaaccgaagtggcatgtctggaaaacgatgtgcccgacccccatctgcactatgctaaagttctacaaacacgtacccgaagaggagtattccgcctctgcttccgcttcgctatggtagaggatgatctgcagaaggtactgaccttttccgtcacccagttgttcgggcgtatgaaatccattcatccttcggtcataaggagcatgaccgcttacagtctgagccgcattctgcctctgttgggcgggtgcatactgtcaaagggaatgtatatagggtagtggaatgctagatacccttaattaccacatgggataggagaattagaagtcctttcttgaaagttcgtgaaaaagcgaactttattcgttaaattatgcggaaagttcacaataaagagattccttgatttaggaatatcccccgcacaattgccattaaataaaagactttttgttttgctgttattgaaagcaaagtggatatggactataatctctattctgtttccggtctgaaagcaacgtgcgcaaggtgagggataaggcatgaggttatgctgtcatcggtgtgtataaatcggatgaatggagataaaaagcaagacttattctaaaaataaatcaatatgaaaaaactgttattattatttttattcttgtgctcgttggaagtagcacaggcacaaccgggtatctcaactgcaataccttctgaaaaaccttcaaaataccagaaagatcagatcaagcgcaagtatggtatgttcattcattttggtatcaatacattccatgatgtggaatggtcagacggatcttttccggtggaaacttatgcccctgcggagattgacgcctgtcaatgggtgaagacagcgaaagatgccggtatgaagtatatcatcttggtggcaaaacatcatgagggcttttgtctttgggacagtaaatatactgattatgacgtggcaagttcgggaaataaaacgaatgtgattgaagccgtagctagggaatgtaagagacaaggcatgaagctgggactgtattactcgttgtgggacaggaaagtcaatgcggatgttgacaatgtggagtcggacaggaagtacaatacatacatgttgaagcaattggacgaactgatggacatcacggaaaaatatactaaaatagtggagttctggtttgatggaagttgggtgaaacccggttatcgctggccggtagaaggcatatacagaaccatcaaaagccgtgagccgcaatgccagatcggaattaactggacgataggcgaggatgcggatccccataatccgaatgcgccggagaaatcatataaaattattccggaggaacagaaggaaggggatcctatccgttattttcccagtgacttccgcttgggcgatccgcttctgcccgcaagtctgataagagagtttgacttcaagaaaaaccggatggagctggtggccctgcacgctacaggtttcggaaggcccagccaggcggcatggacggaaatctttgcggatggccagtctctgcgaatagcccgttggccgaatctctacggttatgattggaaaaatacaggaatcggggatggctaaggaagggaaagaggctcctttccctgtattcggatatcaggaagagcgcccttcgagttggaaatcggtagagaatatgtggataagcggatactttgcgcacggttatgccgatgacaaaagcatcgacacgatacataaaatgattcatacagggcagctacggtatatggatttatgacaggtgcgccttggcgtcaatggtttgccttgaacctgctggaggaggaggagacagagcctcattgacctctgccggaaactatgtggagaattgccggatacatgattataaccggattgagaaatcctatcgtcccggaatatggatggatggtgtgggtaaccgcatctctaaatgtgacatctatgatgcgcccagcatggctatcctgtttcatggaaataaccatgtgatagaactgtgtgacataacgaatgtgtgttctgaagtcgatgatcagggagctgtttattatggtcgtgatccttcggagcagggaaatgttatccgttattgttattttcatgaattgagtccgcgccatcgtgtaacggctacttatcatgatgacggagcttgcggagcggaagtttatggtaatatttatcacaaagcagggtctttgccggtactaatcggtgggggacataataatcattaccggcataatatatttatagattctcctgttgccattcatatagatgcgcgtatgcagggctggggcaaattcatgatagagaaaggtgcgataattgatcagcgtttgcaaacagtcaattataaaaatcctccttacagtacggcctatcctttgctcgctgcatattgggacaatgacacttcttatccaaaaggcaatgtgatagaagaaaacttgttttataagataggaaatgtggtgcacggacagagcgaatggctggaattgtataacaattgggctaccggttcggatccagggtttgtggatgctgctgatccgttgaagggatttaaggatgatgcgctcatttatcaacggatcaatggattcccccggcttccatttgagaaaatcggatgcgatttatccaaatgaaagagtgtgatgataaactttcaaaccttataaaaaaatatcttatttctttaggaacattcctttcccgattgccatataaatagagagtacctttgtttggcgacaaaggatcaacttatttttaaactttaagtcattaccattaaatggaacatcaaaacaaattgatttatggcggactattggcgatatccgctctgaccggctgtacggagccggtaacagaaaaacctttgaatattgtctatattatgacggacgatcatacagctcaaatgatgagttgctatgacaaacgttatatggatacacccaatttggatcggatagccaatgagggggtacgttttacaaacagttttgtcgcaaactctctgagtggccctagtcgtgcttgtatgcttacgggcaaacatagttgtgagaataaattttatgataactctacctgcgtatttgattcatcgcagcaaacttttccgaaactattgcagaaagcgggttatcagactgcattaattgggaaatggcatttggaaagtttgccgacaggctttacttattgggagatagttcccggacaaggtgattattataatccggatttcatcacacaaaccaatgataccattcagagacatgggtacatcactaatctgattaccgatgatgccatagactggatggaaaataagcgcgataaagaaaaacctttctgtctgcttattcatcataaggctattcatcgtaattggatggcggatacctgtaatctggccttatacgaagataaagaatttgctttacccgataatttctttgacgattatgagggtcgttccgcagctgcggctcaggagatgagtattgtgaaagatatggatatgatatatgatctgaagatgctccgccctgacaaggaatcccgtttgaaatcattgtatgaaagctttatcggacgtatggacgaaagacagcgtgccgcgtgggatgcattctacggtcctgtgatcgatgatttttatcagaagaatccgcaaggaaaggatttggctaattggaaattccaacgttatatgcgcgactatatgaaaacagtcaaatcactggatgataatgtaggacgtgtgctcaattatctggaagaaaacgggttgctggataatacattagtcgtctatacatcagaccaaggattttatatgggagagcacggatggtttgacaagcgtttcatgtatgaggaatccatgcgtactccgttgataatgcgtttgccgaaaggatttgacaggaaaggtgatataactgaaatggtacagaatatagactatgcacctactttcctggaactggcaggtgtaaaagtacccgaagatattcaaggcgagtctttgttacctttattgaaaggaaagaagcctgcgggctggcgtaaatcattatattatcatttttatgaatatcctgccgaacacatggtgaaacgtcactatggagtacgtacagaccgttataaattgattcacttctacaatgacattgatgcatgggaactttatgacttggaaaaagaccctgccgagatgcacaatgtaatcaatgatcctgcttatagtgaagtattggctgatatgcaggcggagttgaagaaattgcaaatccaatataacgatacagactttgtaaaataaagacaatgaataagacattcttattaagtgtcatactgggagttttatgctttccggtaaaggcacagaccttgcctgtacctacaccggtacaattgcaatggcagcagatggaaacaacggcatttgttcattttagcgtgaatacttatacggatatggagtggggatatggcaacgagtcccctgccatctttaatccgactaagttagactgtcgtcaatggatacggacttgtaaagaagcgggactgaaaggagtgatccttactgccaagcatcatgacgggttttgtttgtggccgtcggcttatacggaatacagtgtgaagaattctccatggaagaacggaaaaggcgatttggtacgcgaatttgtggatgcttgccatgagtatgggatgaaagtgggattgtacctttctccttgggattgtaaccatcctgattatggaaaaccggaatacatcacttacttccgcaatcagttgcgcgaattgctgactaattatggggaattgtatgagttttggtttgacggcgccaacgggggacgtggttattatagtacggattccttacatacccgaaagattaccgcagattactatccatgggaatctttgacagaaatggtatatgaattgcaacccaactgtgtggtgcatggtggaagtgcacagaacatccgctgggtaggcaacgaggaagggtacgctttggaagagcattggagtacagtgagaaagccggaactctatgataaggggataccaaatggtaaacagtggatgcgcggacatgcggatggtacgttatggattccttcagaaactgatgtatccatccgtcccggttggtattatcatgcttcggaagaccataaactgaaatcattgtcccaattgactgacatttattatgagagtgtgggacgtaacagtttgttattgcttaatctgacccccaatcaagaaggattgattcttgagcaggattccttgcgtttggtagaatggtatcggcgatatacctctgaactaaagaagaatctcgttaatcagaaaatgaaagtaacgggcaagaaccgtaagaagttgaaatatactttggatggcaaccgaggtacatattgggaagctgatacaaaaacgcctgtactggaagtggattttggaaaagaattaactttcaaccgtttgttattgcaagagtttattgagaaagggcaaagagtaaagcagtttgttgtagaatattttgataatgggaattggcagaaattggatgaacagactactatcggttataaacggattctgcgttttcccgaagtcactgcttcacgtctgcgaatacggataacagatgcatgggaggcaccttgtctggcagaaatacaggtctttaaagcggaaactccgctggatgctcctgtgattaccagaaataagaatggagaggtgaagttggtatgcagcaataaggatgcttctatctattatactacagatggtaaagagccacaacctggtgtaagccctcgttaccagtcgcctgttccggcagacggtgatcggattattaaagcgatagcagtggacggaaagaaaaagtcaacaactgctacgcgtacttttaccggcagtaaggctcattggagcaccttgcctgataaagccggtacgcttgtttttgatgaaaaccagcatacaacttgggttggaaaagatgtgcttgaggttgacttgcaatcagcaaaggaaatgaccggtataagctatctgcctgatcaggcacgatgggctaatggaattgttgtaaaatatatgattgagatctctttggatggaatccgatgggaagaggcagcccgtggagagtttgccaatattcagaacaatcctgtagaacagcaggtaattttctggcagacgcataaaggacgctacatccgtttccatgccttgtcaacagtggatggtcaaaagagcatgggggtagcggaattagacattttattttctaaaaactgataagtaatgaaaaagtataactatgtaggatggtgtatggccggtagccttggtttgtccgctatgtccggacaggctgcacaaccggaaaaaaagcaaccgcatatcatcttgataatgactgaccaacaacgttgggatgcattgggatgtgcgggaaatgaagctgtgatttctccaaatgtggatcgcttggcagccgatgggcatttgttttgtaatgcctatacggctgctccaagcagtactccggcacgtgcgggtatgctgacgggtatgtctccctggcatcatggcttgttaggatatggacaggtggcagagcattatccatatgaaatgccgcagatgttgaaagacttgggctatcacacattgggaataggaaagatgcattggcatccgcagaatgtgttgcatggattcgaagtgactattctggatgaaagcggacgtgtggagtctccttattttatgagtgattatcgtaaatggttcaatacgcaggctttcggcctgaatcccgacagtacaggggtggagtggaatgcccacggagcgaaagcgtatgctttgcccgagcgcttgcatcctaccgtatggacaggagacagggcggtggaggcgataaaaggttattcttctgaacggcctttgtttttgaaagtgtcttttgcccgtccgcatagtccgtatgatcctccccggcgaatagtggataagtatgagggcagaaaaatacccgctcccgttgtaggtgactggtgtaaagatctggcaatagatactcatcccgaaaaaaatcctgaagcggctgtaggaaactatggagtggaatatgcccggaattcccgtaagtattattacgcttcggttacttttattgatgagcaggtagggcgcattgtggatgaactgaaaaagaaaggaatgtatgacaatgcgctgatatgctttgttgccgatcatggcgatatgttgggagatcatcatttgtggcgtaaaacgtatgcttatgaaggttcggcagctattccttttattataaagttacccgaaaacatgaaaagtagcctgaaacccggtgaaaaaatagaggctccggtggagttacgcgacttgcttcctacttttctggcattgaacggctgccggattccggaagaaatagacggtctgtctttacttcctttattggaaaaagggaaagctccctggcgtgaatatattgatatagaacattccaccgcttattgggcggataattattggtgtgctttgacggatgggaaaataaagtatatctggtttttccgtacaggtgaggaacaattgttcgatttgtcaaaagacccatacgaattgcatgatttgtcaaaagccaaggcttccggaaagacattggaaaagatgcggaaagcgatggccggacatttgcaggaaagaggggaagagtgggtgaaagacggcaagttggtcatccgcaataaaaatcttttatatagtccgaattatccaacaaataaaaaataaaccatgaagaaattaattctaaccttttcatttttagtgttgttattcggcactttgcaggcatcggtttccattatcccgatgccgcaaaagtgcatcgaaaaaagaggcaattttacggtaaatgacaaaactgtaattacgttgtcagtagataacgaggagatgcgcaatgccgtatctttctggaatgatttgtttgatacggctgccgggttctcattggaggtctcttccactccccgttcttccaatgtgattcgttgccggcttaacacagctcttcccaatgaggaatcatacaagctgacagtctcttcatcttctatccatatagatgccaaaacccctaaaggcattttctatgcttttcaaactttgcgccaattattaccttctgccattgaaagtgacaagcaggtggcggaaaaaataaaatggaacatcccttgtgtggtgatagaagattcgcctgcattctcttatcgcggagtgatgcttgatgtttcccgccacttcattcctaaggaagatgtaaagcgtcacatcgacttgcttgcttttcataaattgaacatccttcattggcatctgactgatgaccagggatggcgtatcgaaatcaagaaatatcccaaactgactaccgtcggaggttaccgtaagaaaacgattgtgggatatatgtgggacaatcctactgaatggaataccaaacgctatggtggattttatacacaggaagatatcaaagaagtggtggcgtatgccaagaagcgttttgtggaaattattcctgagatagaaatgccgggacatagcgtggcggcactgactgcttatcctgaatattcctgtaccggaggaccttttgaggtggaaggccgttggggtgttttcaatgacatttattgtactaaggaatctacttttacctttatgcaggatattctggatgaggtggtggaacttttcccctccagctatatccatttaggtggggatgaggcccctcgtatccgttggaaaaattgtgtacactgtcaggaacggatgaagcaggaacatttgacaaaagaggctgaattacagacttatttcatcaatcgaattgagaactatctgaataccaaaggaaagaaaattatcggttgggatgaaatcttggaaggaggtattctgcaacgtgctaccgtgatgtcatggcggggagagaaagggggaattcatgccgcgaaagccggatatgatgtcattatgtctcctaatatttatatgtatttcaattgtcttcagtctaaagtcaatgaaaagaaaattggaaatcccaatcgggtgattactttggaaaaagtttataattatcatccggttcccgaagtcctgagtgcggatgaggccaaacatattaaaggagtacaggccaatttgtggacggagtatatgtctgcgctcgatgagatggagtatatgctttatccgcgtgtggcagctttgtccgaggtggcgtggagcaaaaaggaaaataaggattatggaagattctgtacccgtttggagagcatccgacggcattatgatgtgttaggagtaaattattgtaagaaaatcagtaatgaatgatctgtttgtgatgaatatgaaaagaaaaatactatttgtttgtctctccttccttgctttgttgcaagggtgggcgcaacatacctggcaggccggtccggtcaatttagaacttattcaacggggcaattcgaagttcccttccggtttctccgctttctcattgaaaaatcgttttatttggtgtggttcggctattcagacagaggaagatggaaagtattatttattttattccgctatgaaatcaggaccgaagtaccctagatttatagatgcttggttgctaggttcgatgattggagtagctgtatcagactctccttatgggggatataaggatataggtattgtctataacaaagatggatatcgtccggacagctgttcatgggatgcacaatcggttcacaatccgcatatcaaaagatataacggaaaatactatttgtattattgtgctacggtggatccgggtggaaatgctcatgtaaagggaaaactaagcagaagagacagactccagcaaaatcaaaagttgggagtattgtgctttaattccataaaagaattactggaaggtaaattttcatgtaatgagcaacctttacttgctccacgtacacgggtgaagcctgataatgtactggaaccctcacctgaaggaaccgtaaccaagcctgataatctcattttagtcaatccggcagtggtatatcatcctttgaaaaagaaatattatctttactttaaagggaatgtctatgatcctacttggcgtggtgtgcatggagtggccatagccgatgcccccgaaggcccttttattgtgcaggatgactatgtatttgagtttgaaacaggggataaccagaaattgaatgcggaagacccgtttgtatggtatcaccggaaagacaattgtttctatgctgtttttaaagatttcacgggaggatttacaaaaggtaagccgggattggccatcatgtatgctgaagatggtatacattggaaacttcctgaacattctttgtttatgaataaagaaataattctaaagaatggagagcggctagaggtagatcggttggaacgtcctcagctgttattggatgaaaatgatgaaccgattgtgctttattcagcttgttccattactccattgaatatgaaacaggatgggagctcgttcaatatccagattccaattcttcgaaataagtaagaaggatatggtataaaagcagtccggcatatggatgaatatctgtgccggactgcttttttatattgtaacggaagaaatggaacttttgataaacctttcggacacacgcttgtttatgataagttcatgtttttgacatgagtaacataaatctattgcaaagactaatgaaagaaaatagacctccttttttgccattttcgcaatcttgctttaactattttaaagtaaggggctttattggattttcggaactgtgtatcagaacatttcatcctgattcacaaagatatatatgtccctatttgtccgatgcgcatattttggagttccggcttccggcggcgactatagagtgtgttatcaataaacaaggtatatgcattgaggctatcatgtttaccgattagtaagtggttttggtttaatcttcctttttcatttcttaataattaagccaaagtttgaatgaagaaagtttttcttcactgatggtgatttggactttgtaaggaggaaggacactgattactatcttgccattaaaataaggttcggcacggtctatggaagcaatgctgataataatctaacggttggcgcgaaagaactgttcggaggctaactgctccatttgtttattcagagacaggttgattatgtgttcttgtcctttttgggtgacggcaaaggttattttgttttcagaatagaaataggcaatgtccgttacttgaagagaccagaaaaggccggctccataaaaaatcatcttctataatgattgcgtttagtttattcatatgctaaaggtacttttatggtaaacaaattgtttgctttggtgacttatcattgctttcggcagcacaggaagaaagtagtgcggcaaggcttaataatggcatggaatgtacgttaatcttcatgttttgtcttttaagtttgcgacaaaagtaaagatggaagggagagcagctgggaaagaaaatgctgaagccggaaaaagaagatcgaaaaaagggaaaatgcatcctgaataattttatcaatgaagtaaaaaaagatttattcaggcaactttttatacagaatagctgtttttatcagtaagatgattaattataaactctaaaaaacaaagcgtatgtattttatttggtacattattatcggaattattgctggttttgttgccggtaagttgatgaggggaggggggttcggtctctttattaatttattggttggtattgttggcggtgttctgggcggctgggtattcagtttgtttggtattgcagcaacaggtattatgggcagtcttgtaacctctattgtgggagctatatttttgttgtggattgtttctttgctcaagaggtctgatatttcctgaattggtagtaaaaaggaaccgtcctgacgacacgcttgtcggggacggttcctaaaccaaacaaatcaaaaaatataagtatattaactaattgcttccacctcctaaagcgcggtaaagcatgatatgcagtttacaagattccacattcagagcgatacgttccaattcacaatccaggaaacgttcatcggccgacagtacatccagatagcctgcgaatcctactttaaacatttcatttgcattataaatagatcgatgatggatacggctttcttcttctttcaactctttgcgctggtgcatttgggatgatgcagtaatgaggtttaatacttcttcataggcttttaataccgtttcgtgatatcctaacaaagcgatgcgttgctggcttttcgcatcattccataatgcacgtatagtattttgtttgaatataggtgctgtgatacctgcgccgagattgtaaaccagggatgcaggagctgtaaaccatttatccagatcaaatgcgttaaaacctccgtttcctccaatcacgatggatgggaagaaagcttttcgcgctgcagatacgtcggatttactagctaataattccagttcggcagcctttatatccgggcgatattgcaaaagttgtgacgggatccctgcatctgtgggaaactcataactacatgctgtttcaaatgacactcgtttcaccttgaaaggcagtcgtcctaataaggtggcgatggcacgttccttttcacttatttgctgttcgtttgcaagcagcatttcttccaatttaaggcgtcgtgaccggaattggtctacagaaagtcgggttacttcaccttctttcatcagttcattggttaaattataagcatctctggctgttaggatggcttcgcgtagtacataccgctgtttgtccagtcctattaattcaaaatagtgtgtacctacttctgatatcaataaagtacgtgccagacgcatagcttctacagactgcatccagcgggatacggccgatcgttttttatcggttagcttaccccatatgtcagcttcccattgaaaattaagtcctagattgaaattccgatagggatctggaatatgtttgtctttttctaaatcgggagtgttggtggtgctgttaccaactccgtccatagtgtactcgccaaaacgttgtactccaccatcaatgcctaatgaaagatcgggcagcagcgctccttttcctactcgaacttgtgaacgggcaacggatatccgttctatagtttgaaggaatgtgtgattattatttaacgcttcggctatataactttgcaataacgtatctggaaaaaatgttttccatgacaaggaagagatagtggtgctgtccgtttccctatccatatagaactcgggtaactctatcttttctgtcggagtaagggaaggggctttgcaacttaccataatcagacagaaagcccccattattaaacctgttttgtttatattgttatttttcatcttcttcatcatagctgactttattacggttaagatgtgcagaccaactctcgaaaataaggtaaagtccaggtacaaggaagattcctacaaatgtaccgataaacatacctccggcggcggctgttccgatggaacggttgcccaaagcaccggctccgcttgccattaccaacggaatgagtccgcatataaatgcaaaggaggtcatcaggatgggacgcagacggcttacggaacctctaacggcagcatcaaaaatgctcattccctgcttgcggtactgattggccatttccacaataagaatggcatttttacctagcagaccaatcagcatcactaaagctacttgggcataaatattattctccaagcctgccagttgcaggaaaaaataagaaccgaagatacctgccggcaatgaaagtatgacggggaaaggcagtaataaactctcgtattgtgctgccagcaacaaataaacaaatagcaggcagataccgaaaataaaaacagtttgtccacccgagtctttttcttcacgagtaacccctgaccattctatatcataaccgcgaggtaatgtttctttggcaatttgttccacggcttcgataacctctcctgaactgactccttcggcaggttcacctgtaatcagggccgaggtaaacatattgtagcgtgtaatctggttaggaccgaatatacggtccatcgtcataaagttagagtagggtaccatatttccgtccttgttcttggcatagaacttatacagatcttcaggattcatacgatactctggagaagcctgtaacatcaccttatacatttgtccgaaacgaataaagttggatgagtagaaactgccgatataggattggagtgtttccatggattcatttaaatttactcctaatttagctgctttagcaatatccactttcagcagatattgtggaaaattaggattgaatcctgaggttgctcccacaatgcgcggatcttcattcagcttttctactaatgtattggcaacatcggcgaattctgcaaagctgcctgctgttttatcttgtaaacgaagttcgaagccgctggcattaccgaatcccggaactgtaggaggcaggaagaactgaatatccgcatctttgatatgtgaggtacggtctttgtatatctctataagttcggctgctgtttgatcgcgttcactccacggggtgagattaatcatacccataccgaaattggcgccttccgtttcagtcatcaaactataacctgctaatgtggagatgctttcaatttctttgaaaggaagcagtgcagcttgtacagcgttcaaggctttttcgctacgttccaatgttgctcccggaggcgcatctacattaacataaatcatactttggtcttcattgggaataaagcctgaaggaagtacttgactcatgccgaaagtggcaaggaagaaaataatcagtgtggcataagtgattattttccggctcaaatacttgtgtaatccgatattgtatttcttttcaaagcggtcgtaccgacggttgaagaaaataaagaaacgacgtagccatcctgcttttttcttcttttttccatcagcgggtttcagtaacaaagcacatagggcaggcgagagagtcaatgcgtttactcctgagataacaatggctaccgccagtgtcaatgagaattgccgatagaaaatacctactgttccctgcatgaagcccaccggaacaaagactgccgacatgactagcgtgatggcgataatggctccaccgatttcattaatagctgctacagatgctttataaggagagagtttctcatgatgcatctttacatggacagcctccacgacgactattgcattgtctactacaatacctattgcaagcacaagggcgaataaggtcaacatatttatggaaaagcccagcatctccataaagaaaaatgtaccgaccaatgaaactggtacggcgatagcaggaattaaggtggaacggaagtcttgtaaaaatatatataccacaataaataccagtatgaatgcttcgagcagtgtcttcagcactgattgtatggaggcgtcaagaaagcgtgatacgtcataggagatattgtaatccatgccaggcgcaaaactgctttccttgatttctgccatttttgttttaatattttggatgacttcccttgcattggaaccggggcgttgtttgatcataatagatgccgatggtcttccgtcggtcatagaagtcatgttataatcttcagaatcgaattcgatagtggcaacgtctttcagacgtagcagtgaaccatcgggaagagctttcaatacgatctctccatattcttctgctgtgctgaactttccggtatattgtagtacatattgcagttgttggggtaatttgtctgaactgatacctgtcttgccgggtgctgcttctatattttgattacggatggcttcagttacatcttgaggtaccatgttgtaggcggccagccggttaggattcaaccatacacgcatggcataatcacggctacccatgatttctaccaagcctacaccgtcaatacgttttaattcgcgcaaaatattgatatcggcaaagttataaacaaacttttcggtatgtgcactgtccgtactcatgatgttcaagtacatcaacatactgtttacttctttttctgtaataactccggcacggattacctcttcaggcaattcgtctagcacggtagtcacacggttctgtacatttacggcagctacgtctggatcggttcccactttaaaatagatagtagtgagggacataccgtcgttggtacaaacagtggtcatgtaggtcatgccgggtactccgttgatggcacgctctaacggggtggcgactgttttagacatcacatcggcactagccccagtgtatcgggcggttaccgttacagatgggggtacgatatcgggaaattgagtgatgggcagtgtcaagatagacagcacgcccaagcagacgataatgacggagattactcctgaaagtatcggtctttttataaatagcttaaacataaactgtccgttttattttacgataggttgttttaattcaacttcttttctgattgcttccatatcaatggtatcggtcttgatggtaatgccgtctttcatcatttgcactccctcgtatacgatggcagtattaggagtgaaatcttgtgtcacgtagtaattattatagcgttccagcggttgaaaactgcgtacttttactacactggtactatcaacggtatacacataggtgaaatcttgaatttcgaatgttgatttctggggaactagacagatgttgtccatttgagtcatcatacgcacttttccggtcactccatgtttcagcagtccgtccgggttcggaaaacgaacacggaaggcgatggagccggttcctcgttcaaaatcaccttctactgtttccaacgtgcctttgtgggagtagatggaaccgtctggcaaaatcagttccacattattttcttcgtgttgtttttgtccgctaagttgttggcgcttgtattccagatactcgctttcattcactttatagtaagcaaagatctcggaaatatcacttacggtagtcagtaagctttgcggatttaccagacttcccgtcttatagggaatacggtctatgtagccgtcaaaaggggcagtgatagtggtgtaagaataatccatctgtgaacgttgcatttgtgcttttgcctgttccactttcatttgggccacttctttttctttattggcttggtcgagtcggatttttgataagatttgtttgtcaaccagccggcctattctctcggcttcataatttgccatttcatattgtgcctgtgcttgtttgtaattggcttgcgcctcttttaccgtttcgctatattggtcggaactaagttggaataggggctgtccttttttgactttttgtccttcgtctacatatattttttgaacaaaaccttccactttgggcttaatttctacaaactgtatagcttgcacatcagctacatacgagcgtggaaactcaatggttgtggggtgaagaatggtgatgggaatgaattctttgtgatgttcctgcttgttgtccgattgaccacaagagcatagcaatcctgtacatgtacacaggaccgcaattttctgaaaattactcttcatgaaattacgaatacaatttaaaaagattaataattgagtttgagtaaataaaagattcggcttgcattcagatttctcagaatacaagaccaatatgtatgaagatactttaatgtgacatattaaatgcggtatacacaaaagataatgtgatgatgtaccacttttcccagattttcactaacaggtgtataactctgtaccggaacttggggaatagcaaaaagattgataatcatgtcaatagtacagggtaaaaaacgactgttcggtagttgtgcacgtcccgacatgaaataataagtctcttctcctccgctttcttcattgttgtcagaaggcagggtgggctgttccatcgtttctaccatagccagattggcatcaattagtggagcgcatacatcaaattgtacgagtaataacataattacacatactattcttaccacatatttcttgataccgttgaacatgaaaaatattttgtttattaattcgtttgcaaatttaatataattgaacactgttttcaaaccaatcatccaaaattagtgagttttaatatatcctttctcttttttggaactactatcctttatactgactgaaatctgttatttttgtactcagtattttaaataatcagataatattacttatgttacaacccgaattgaaatttcgtcgagataaaatacgctatttgatggcccaacaaggtattgatgcagccctgatagcttgtaatgtaaatttgctttatacgtatggtgagatagtgaacggctatctttttttaccgcttcattcaccggcgcttctctttgtgaaacgtcctaataatattgtgggagaatttgtattccctatccgtaaacccgagcagatggtggacttgttaaaagaaaatggtatacctgtagcttcaaagataatgttggaaggtggggaactgccttatgcggactatatgcgtcttgcatctctttttcctggatcggaggtagtggatggaactgctattattcgtgaagcgcgtagcgtaaagactccgttggagattgaactttttcgtcggtcggctgctttacatgctcgggcatatagtaagattcccgatgtataccatccggggatgactgatcgtgaactatctgttgaggtggaacgcctgatgcgactggaaggttgtctgggaatattcagagtatttggtcagagtatggagatatttatgggaagtgtgttggccggagataatgcagctactccttcgccttatgattttgccttaggtggtaagggattggacccgtctttgcccggaggaatgaatggaactttgttgaaagaggggtatagtgtaatggtggatatagggggaaacttttacggatatatgtgtgatatgagtcgtgtgttctccattggaaaattaaatgatgaggcttatgcagctcatcaagtttgtcttgaagtacaggataaggttgcttctatgacagcgcctggtgtggtatgcgaggatctttataatgcggccattgagatcgtgacgaaagctggatttgccgatcgttttatgggggtgtcccagcaggcacgttttatagggcacggcatcgggttggagatcaatgaggcaccagtgttggctccgcgtattcggagggagttggaggaaggaatggtgtttgcccttgaacctaaaatcgtattgccgggagtaggaccggtcggcattgaaaattcttgggtagttacagaaaacggggtcggcaaactgaccatttgtaatgaggagattatagagctttgattctttggatgcaaatattgaaccggaagaaattaaaagaagcgaaaagctttatggttcttgccctagtgtcattttgggcaaagtgaagagcctgaatataaaaaggatcccgaaacttttagtttcgggatcttacatggtttgaaatacatttcttattcccactcaatggtagcatttggtttgggcgacaggtcatagcatacgcggttcacattctttacttcttttagaatacggtcggtaattttcatcagaatggaccagtctatcggttcgatagtagctgtcatagcatctacggtgttgacagctcggataataacaggccagtcaaatgaacgggcattgtcacgcacgcctactgatttgaaatcgggtactacggtgaaatattgccatactttcttgtccaagcctgccagttggaattcttcacgcaagatggcgtccgattcgcgaacagtttccaggcggtcacgagtgatagcccccaaacagcgcactcccaaaccaggaccggggaacggctgacggtagaccatatcgtatggtaaaccaagttccactccgcaggcacggacttcgtctttgaacaactggcgtaaaggttctactaattcaaactgtaaatcctcgggtaagccacctacattgtgatgggattttaccattttggctgttttagtaccactttctacgatatcaggataaattgtaccttgtcccaaaaagtcgattccatttagcttacgggcttcttcttcgaacacacgaataaattcaccaccgataatcttgcgtttctgctccggatcagctacattttctagtttactcaggaatcggtctgtagcatccacgtaaattaaattagcgttcaactgatttttaaaaacttcaatcactgcttccgattcacctttgcgcattaatccatggttcacatgtacacataccaaattattgccgatggcttttagcaacagggctgctactacagaactgtccacacctccggaaagcgccaataaaactttcttatcgcctacttggcggcggatcaattcaatttggtcattgacaaagtttgtcatattccagttggcctctgccttgcaagtatcaaaaacaaacgattgcactgcattctttattgcttccacatcatccgtcagttgggggagcttcacttcgcagcatgctttgtcatgaccggcagccattacgggaactcctgctttgtaaatctcgggaagcacgtcaatatccactccgtcaatcacatggtttgggccaccattgataatgacaccctttacattgggcaatgctttcagctcggcggctgtgatatcgtgcgggtaaatttcactatatacacccaaagcacgaatggctctggcaagcacggtgttttcggtacttcccaaatccaagataacaatcatatcttgtttcattccgttatgttgtttttaagttattagttggttgtctattattcccactcaattgtggcaggcggtttggacgagatgtcatagcatacgcggtttacgccttttaccttattgatgatgtcgtttgaaaccttagccataaattcataaggaagatgagcccagtcggcggtcatggcatccgtactagttacggcacgcagggcaacggcacgttcgtatgtacgttcgtctcccattactcccacactttgtacgggtagcaagattacgcctgcctgccatacttgatggtaaagggatgtttcgtttccatccgaatctttcactttccagtctctcaatccttggatatagatatcatcggcgtcttgcagaatacgtactttctcgggagtgatatcacctaaaatacgtaccgcaagtcctggtccggggaatggatggcgtgtaatcagatgttccggcatacctagttcacgacctacgtggcgtacttcatccttgaatagcagacgcagaggctcgcatagtttcaaattcattttttcaggtagtccacctacgttgtgatgacttttgattacagtgccggtgatgcttaatgactcgatacagtcaggataaatggtgccttgtgccagccatttcacatctttaatcttatgagcttcttcatcgaatacgtcaataaaacctttgccgataatcttacgctttttttcaggttcttccacacctgccagttcgctgaagaatttttggctggcatctactccgattacattcagtccgagacattcataatcatgaagtacatttttgaattcgttcttacgcagcatgccgtgatctacaaaaatgcaggtaagattcttgcctatcgctttatttagtaatacggctgctacggatgagtctactccgccactcagccccaatactactttgtcatttcccagttgcgctttcagttcggctacagtcgtttcaatgaaggaggcagcactccagtcctgtttccctccgcaaatgttgactacaaaatttttcaggagctgggttccgtcttcgctgtggaacacttccgggtggaactgtactccccatactttctcttcctttatttgataagcagcgatggctactttatctgttgaagcgataattttgaaattctccggaatggcggtgatggtatctccgtggctcatccatacttgtgagtgctcacgaacgttcctcaatagtgggttttcttggtcgaaagtggaaaggtgcgcacgtccgtattcacgtgtgccggccggttctacttttccaccgttcgtataagacatgaactgtgcaccatagcagatacccaaaataggatactttccgcgaatgtcactcaaatcgactttaaaggcgctttcatcataaacagagaaggggcttcccgaaaggataacgccgattacggacggatcattgtgtggaaatttgttgtaaggcacaatctcgcaataagtattcagttcgcgaacgcgacgggctatgagctgtgtggtttgtgaaccgaagtcgagaataatgatcttttcttgcatatattattaagatatgtaaatgatttcgtgccgcaaagatactcagaaaaaataaaaatccgtcatgctgttgaggctttttataattgaattggaaaaactttgttcttcctgcttccttgtgggaaaatatgcaaaaaaagattggaaagtttaggaaatgtcggctagtatgtagatcacgggctgtccgacaagcgcttgaggggcagtccgtttttttgtgaataatattttattttttgtcagtttgttctttcaacaaatcacggatttctgtaagtaatacctcctccttgctgggggcaggcggggcagcgggagcagggacttcttctttcttgcgattcagtttggcaagtaatcttataaataagaatatagaaaaagcaatgatgataaagtcgaaagtggcttgtaggaagttgccataattcaacgttacggcagctttttcaactccatccactacttcggccggctttaattgtagtttcaaatctggtaagttcacgccacctaccagcaatccgatgggaggcatgatgacatcggccacaatggaagatactattttaccgaaggctccaccgatgatgacaccgactgccatgtcaatgacgtttccgcgcattgcgaacgccttaaaatcttgcaagaagctactttttcccatttttttttattttaatatgaatttatgtgcgaatataaaaacaaattcttatttttgcaccgcgtttaggaaataaatactaaacgtttaacaacattccaacgtagagtgtttaaaagctatattataaaacctttaaaatttaaacaaaatgattaaagtaggtattaacggatttggtcgtatcggccgttttgtattccgtgcagctcagaaaagaaacgatattcagatcgtaggtatcaatgacctttgcccggttgattacttagcatatatgttgaagtatgacactatgcacggacaatttgacggtactatcgaagctgacgtagaaaatagcaaattgatcgtgaacggcaatgcaatccgcgtaacagctgaaagaaatccggctgacttgaagtgggatgcaatcggtgctgaatacgtagttgaatctactggtttgttcttgactaaagaaaaagctcaggctcatatcgaagctggtgctaaatatgtagttatgtcagctccttctaaagatgatactccgatgttcgtttgcggtgtaaacgaaaagacttatgttaaaggtactcagttcgtttctaatgcttcttgtactactaactgtttggctcctatcgctaaggtattgaatgacaaatggggtatcactgacggtttgatgactacagttcactctacaacagctactcagaaaacagttgacggtccttctatgaaagactggagaggtggtcgtgctgcttctggcaacattatcccttcatctactggtgctgctaaagctgtaggtaaagttattcctgaattgaacggtaaattgactggtatgtcaatgcgtgttccgactttggatgtttctgtagttgacttgacagttaacttggctaaaccggctacatacgctgaaatctgtgcagctatgaaagaagcttctgaaggtgaattggctggtgttttgggttacactgaagatgcagttgtttcttctgacttcttgggtgacactcgtacttctattttcgacgctaaagctggtatcgctttgactgatacttttgttaaggtggtttcttggtatgacaacgaaatcggttactctaacaaagtattggatttgattgctcacatggcttctgtaaactgctaatcagttaaaaaccatatagtgaaagccgtctgaagtaattcaggcggctttttttatgtagttttgcgtggtaagttgcacattttcgttatctttgtgcgactgttacaaaaacttaggatggaaaagtacgatttgataacgatattaggacctaccgcttcaggaaagactcctttggcagcggctttagcttacaagttggataccgaaattatcagtggagatagccggcaggtatatcgccggatggatttaggtacgggaaaagatttggaagactatatcgtgaatggacagcaaattccttaccatctgatagacattgtagaccccggatacaaatataatgtatttgaatttcaacgtgattttttgaatgcctatgaccaagtgagatggaaggaaaaaattcctatattatgcggaggtacggggatgtatcttgaatccgtgctgaaaggatataggctgcttcctgttccagagaatcctaaacttagggactcattagcgggtaaatcattagcggaactcacccggttgttgtcaacttacaagaaacttcataactctacggacgtagatactgtaaaacgagctatccgggccattgaaatagaagagtattacaagcaccaatcagcggaatgccgtgagtttccgcaaattcatagtttgatcattggagtggatatagcccgtgagttacgtcgtgaaaaaatatcccaccgtttgaagcagcgtttggatgaagggatggtaaacgaagtaagggctttgttggatagtggtatttcttccgaggatttgatttattacggattggaatataagtatttgactttatatgttttgggtgaactttctttcaatgaaatgtttcatcaattggaaatagctatccatcaatttgccaagcggcagatgacctggttccggggcatggaacggcgaggggtcactatacattggctggatgcttgcctgcctatggaagataaggtggaaaaaatcattaatttgttacacactaaaaactaaatgttatggctgtagaaccaaacagatgggggattatttataatccgaaagccggaagccgtaagactcagaagcgttggaatgagatacgtagctatatggaaaaccgtaaggtggtttttgactacgtacagtccgaaggttttgggtcggtggaacgactcgcccgtaccttggctaataatggttatcgaactattgtgattgtaggtggagacggggcgatcaatgatgctattaatggtattatgacttctatggtggaggataagacaaatatcgctttcggaatcattcctaatggcattggtaatgattttgccaaatattgggggttggatgaggataattataaagcggcggtagattggattataaatcgtcgtctgaggaaaattgatgtggggcgttgtaattattttgatggagagaaacatacttcccgctatttcctgaatgccatatatataggtttaggtgcgcgtattgtacagatctcagatggtacccgccgtttttggggaatacgtgagttgtcttttgtcgcttccatgttcctgttgctgtttgaacgtaaattgtaccgcacgcatctttgtatcaacggcgaacatattcgtggacgtatcatgacggtatgtgtgggaagtgcccgtggatacggtttgacacctagtgcagttccttataatggctggttggatgtgtcggtcatttatcgtccggagttaattcaacttttctcgggtatgtggatgctgttacagggacgtattctaaatcataaaatggtgaaaccctatcgtacacggaaagtaaaagtactacgtgcgcagaatgcttctgtcagtttggacgggcgtattttagaccgccatttccctttggaaattacgatccagcctgaagctataactttgattatccctaattaaaaaatatagatatccatttcttgttttaagagtaaaagcagagtagatatctcaacgaatagacgtaagataatgacaatttcagatttaagaaagacagataatttctttttattggctggtccttgtgtgatcgaaggagaggaaatggctctccgaatagcagatcgtattgtgaaaataacagataaactgggtattccctatgtgtttaaagggtcttatcgtaaggctaaccgttcccgtttggattcgtttacaggaataggtgatgaaaaggctttgaaagtacttcgtaaagtacgggaaacttttgatattcctatagtaaccgatattcatagtgctggagaagctgctatggccgctgagtatgtggatgtgttgcagattcctgcctttctttgtcgccagactgacttgctggtggcggcagcccataccggaaagattgtcaacatcaagaaaggacaatttttatcacctggtgccatgcgttttgctgctgacaaagtggtggaggcgggtaatgatcaggttatgctgactgaacgaggaacgactttcgggtatcaggatctgattgtagattatcggggtattccggaaatgcagactttaggttttcctgtgattctggatgtgacacattctctgcaacagcctaatcaaactgctggtgtgacaggtggtatgccgcagcttattgaaacggtagccaaggctggcatagcggtaggagtggacggtttgtttatggaaacccatgaagacccttctgtagctaagagtgacggagcgaatatgctgaaactggatttattggaagggttattgaccaaactggtgagaatccgtcaggtgttataaatgttatttgttggggcttcacaggtaagatgggttaatttttatttggactgtggggcaacttgcatgaatagtataaaataaggccggttcttgcagtagaaatcggccttacctttctttctccattaaaacagaagaaagaatagaagcagatgtgaattatttttttagaatataagccttcatgcgggctatatcatttaagtaatcttgcaaatcttgttcatggtcctcttcttctgccataatatgtttggcaatatcacaagtggtgaagtcaattccgtttgtgaattcggcaatttgctgataacggtagatggcacaacgttcggattctacattttgtttcaacaagatttccgaaccgaaatctacgggcgcatcatatttgcagcgagctaaatcaaaccattgtttagggtcaagtacgggtacaccttccaattcaatgatacggtcggccaataattttgcatggttatattcctcggctgcatgttcttgaaactcgcgttgtacatcaccgcgcatagcgccttctactacgaacgaacctacccaatactggtagaaagccaaccattcttcagacagagctgcattcagctgagccaacaagtccacaatgtcaattttatccttcaggatattcacagattctttagccataatgtaaagtttaagttagtgtttattattatttagtccacagcgggtatagtcatgtcgtctaacacgcctacgccttcctggtctacatctttttttacgtcagaactggtataaagccagataccgaatcccagcacaaataaaataaggaggatgattccccataatttacctttactcatagttttttggtttttagtttctctaataacagatggtgcagaaaaaggtttttataagtcgcgaaaaaaacaggcgtctgttatggaaaaacggacgcctgtgtgtgtgaagtatgaattgatattagattttatcctattttgctgattttttttagtttctcttcatcaatgattttaatttttctaccgtcgatggtaattagtttttcagttgcaaagttagaaagcgtacggattgcgttcgaagtagtcatatttgataagtttgccaaatcttctcgtgaaaggtaaatgcttagtgtagattcatcttcttctactccataagtatctttcaaaaataacagagattctgccaatcgcccacgaatatgtttttgtgtaagatttacggttctttcatcagaaattcccaaatcgatagaaagttggcggataaagaacaaagctaattctgagttgtcttttatcagtttcataatggccggcatgggaataaggcagatagtgcaaggttcgaaagcagaagcagctgtcacaaagttcccttcggcaaaaaaggctcggtatgcgaaatattctttcgtctttaatacgcggataatctggctacgtcctcccacaccttctttgtagatttttacttttccactaagaagacacataaggtgcatcggagtttctccttcgcagtatatcgtctcattctttttatacttttgtatcgtaaagttctgagccaagaactctctttgttcctgtgttaaaggttgccataagtctggtatactttcagcaatctcagtttctgataattcttttctaaccataaacgtgctataaaaccgtgttatagagcacaaatataagaagaaaaaataaaaggacgaagtaatcagaagaaaaaagaaagatatattattaatttatcttcaaaaaataacaaaaggataggtttttatctcctatcctttcttttttgtgtgaaattttatttggtgaacagtaattcacgatatttaggtaatggccaaatctcatcgtctatttctagttccaaatggtcaatatggtcgcggatttcttccaaatatggacgcacttgttcctcgtaactgaaggctttctctacttggcttcccaaatgatttgctacttttcgggcttctgtcatgttgtgcacggcttttttaatagcaagtatgcggttttgaatttcacgtaccaaattcttccggtcctcggtcagtttttcatattcttcggtggagaatatctcttttagaccacgaagattttctaatagtctgttctgataaattacagctgtgggaacaatatgattgatggccaggtcgcctagtacacggctttcaatctggacctttttagtaaacttttccagttccacttctatacggcaaaacaattcattttcattgaatattttttcgcctatcagtactgcacgagattgtttatcgttgaacttcaggatggcttcgggtacatggcagatattagtcaatccgcgtcgcgcggcttctgctttccattcttccgagtagccgtcaccttcaaaacggatgttttgtgaagcgataatggtttcttttaataccttgtatagagcttcttcctgttccatccctccgtttactaatttatctatctgggtcttgaactcattcaactggtgtgccatagcggcattgataacaatcattgatgcggcacagttagcagatgaacctgcggcacggaattcaaaacggtttccggtgaaggcaaaaggagaggtacggttacggtctgtattgtcttgcaatatggcaggtatgcgcccgatacccaattgcaatgctttcttttcatcaggggtcagttcagcgtcattcagacgtgccactacttcgtctaacatatgggaaagatgacgtcctaggaaaatagacagaatggcgggaggtgcttcatttgctcccaggcgatggctgtttccggcactgacaatagaggcacgtagtaaatcctggtttttatagaccatcatcagtacgttgactatgaaagtaaggaaaagcatatttccttccgcagtcttggcaggagagaacaaattgatacctgtgtctgtacaaagtgaccagttgttgtgtttgcccgatccgtttactcccttgaatggtttttcgtggagcagtacagtaaaattatgtttggaagcgatacgcttcatcaggtccattactagctggttgtggtcgttggctagatttacatcttcaaaaataggggctagctcaaattggttgggagccacttcgttatgccgtgtttttaccggaattcctagtttgtgacattctagttccaactctttcataaagctggttacacgtggagggatggaaccgaagtagtggtcatctagctgctggtccttggcagacgagtgtcccattaaggtgcgtccggtcagacaaagatccggacgtgcattatatagtgcggtatccactaaaaagtattcttgttcccaacctagattggcgaatacgcgttttacgtttggatcgaacattctgcaaacttcagttgctgctttgtctacagcacctaatgccttcaataaaggagttttatagtcgagtgcttcgcctgtataagagatgaagatagtaggaatacaaagtgtgctgtctacaatgaaagccggagaagaaacatcccatgccgtatagcctcgggcttcaaatgtgttccggataccgccgttgggaaaactggacgcatccggttcttgttggataagcagtttgcccgagaagcgttctataacattaccgtcatcaccgaattcaataaagccgtcgtgcttttcggcagttccgtcagtcagaggctggaaccaatgagtgtagtgggtaacattaaaggtctttgcccaattcttcatgccattggctatcatgtcggccatttcacgattgataggggtacctttctcaattgcgtttattactgctttataagcctcactaggcagatattcctgcatttttttacggtcgaatacgtggttaccgtaataatcagctaacttttcagaggggtagtcaactttaacggggcgtctgttggctaactcctgtagagcaaaaaatctcattttggacatgttgtctttcttttactggttgttggctgcaaaaatactgctttttgattaataattcgctatatcgctaatcatttttcatttctgttaaggatgttaattaagtattatcatgcatcagcctgttggtttttgtttatatttgctcttcaaatgatgaaaagaaagtacattgatgcactatatacggattgtcagactgattatattttgtcttttgttacctttagctgttcaggctaagagggaaaaggttgatatgcccgacaagccggtggtgtctgattccattcttcagtgtattttccagttttcgccgttctattcccgtatcattgatgagtataaggctgatttatatataaaaggaaaagtgaaggtacataagcgcaatcaccttatccgctatgtaccgtccatgttccgtttcgaaaaacacatcaatgattatcttatggagtctcttagtgagttgcattatacggcccctgatatatacgaccgtaagataaaggcggtatctactacatttccacgtaacaggggacagataacggatgtgatggattatttgaacatgaatatctattcttcttcattgatgtccgataaacttctttctccgttggataagaaatctagcagatattatcattatttattggattctatagctggttcttccgactgccagcggtataaaatactcattattcccaaattccgtggtacgcaattggtcagtggatatatgtgggttagtgatcagatatggactattcgtgaactttatattgagggcgtttatgatgtgatccgcttcaaagttcgtgtcaagatgggggaggagggcgatgtggagtttctgccggtgcagtttgatttgaatcttgtttttaagtttctaggtaaccatctggaaatggatataggagcctggttgaagtacaatgagattaaattttatgaaggagccgcccggcgtaaatctcaaaagaagcatcaccatgatctgacggaatcctacaagctgacttgtgattcggaacagctgataacagataaggaaaagttcaatgaactgcgtcccattccgttgtccgctttggaagattctttgtacagaagttatgctttacgtcaagatacgcttttacgcgtaccgaaaaagaagaagaatgaacatttggagttttggggagagttgggtgatatgcttatcagtagttacaatgtgaatttgtccagcatggggagtgtgcgttgttctccacttattaatccggtgttgttggattatagtcacagcaggggtttttcatataagcagaagtttaaatacagtcggctttttcatgatgggcgtgtacttagaatcagtccgcagataggttataattttacacataaggaactttatgtgaaagcggatgccgattggcaatattggccggaaaagcaggctagttttgaggttagtgtaggtaacggtaaccgcatatatagtagtgtcgtattggatcagctaaagcaattgcccgatagtacctttaattttgaccaattggagttggattattttaaggatgtgtatctcaatctgttccataatatagaaatagtgaatggcttgtttgttaaagcaggtgtttccgtacattggaggtatctgataaataattcgaaagtcattcttgaaaagccgttgcctgataaggattgggcggcattgcgaggtatcagatcagaatacaatagttttgcacctcgtatacgtattgaatggactcctggtatgtattattacatgaacggtcgccggaagatgaatgtaggttccagtatgcctacttttatgctggattatgaacggggtattaaaggtgtattcaagagtacgggtgctcatgaacgttgggagtttgatatacagcaaaacttgaagctaagcggaatccgaagtatcggttatcgcattgggggggggatgtttaccaagcaggaagatatgtatttcgtggattttgccaactttgcccgtcgtaatcttcccgaaggatggaatgatgatattggtggcactttccaattgttggacggacgttggtataactcctcacgtcagtactggcgggggaatttcacttatgagtctccctttattctcttgaaacccttaaaccgttggctggggttagtccagcaggagcgcttgtatggtggtatcctgttcatgccacatcttaatccatatatcgagttgggttatggcatcggtacacatatatttgatgtgggggcttttgtaagcactatcaacgggcaatttgatacctttggttttaaattcactttcgagttatttaataaataatcctgttcaaacaatctgtttggttttctgtttattacaacataacagaaactaaacagtgtatgcattataaaatatttttatgtgtccttttgttcccggtttcattatcagctcaaaacggggaattatctttaacattggaacaatctgccagcctgatgaacaagggcagccacacgttgcaaatggcggataaggctatagagatagcacgcagtgagcgacaaaagatgaatgctttttggtatccgtctttgaatgcatcgggggcatacgtccatttgtccaacaatattgaggtcaaggaacctttaaagcaatttaccgatccggcaaaagactttgtacattccattgtgcccgatgataaatttatttcttctattcttgataatataggtgcgcatactcttacttttcctttgttagaacgtaacctgacaaccatagatgctaatgtgatgtggccgctttttacaggcggaaaacgaatctttgcgacccgtattggtaaccgtatggtagatttggccaaagcaggtagggaagaggcgggagctactttgcaatcggagctggtggaaacttattatgctttgcgtctggcgcaaagagtggtggatgtacgcgagcaaacctttctaggcttacagaaacattaccgtaatgctatgaaactggagaagaacggtatgataaataaggccgaacgcctctttgcccaggtcactatggatgaagccagacgtgagttggaatctgctcggaaagatttaaatgtagcgcaaaatgccttgaaagttttgttgaatgtggaagacgctacatccattaatcccagttctcctttgtttatgaaccatgatctgcccgatgaactttatttcaagaatctggtaagtaccggcaactatatagtaagtaaattgcgaatacaggaggtgatggcagataatcaattgaaaatcagtaaaagtgcatacatccctaccattgcattgtttggaaagcagacactttatgcagacaatcttccgaaaaacttgatgccccgtactttgataggggtgggctttacttggaatatattcgacgggctgaaccgtgaagccaatatccgtcaggcgcgtcttactaaacaaactttgcaactgggacgggaaaaggttcagaatgaattgggagttctggtagacaagttatatagcgaaattcagaatgcaaaggatgatgtcgccgcactcaataccacgattgagatgagtcgtgaactggtacgtatccgtaaaaagtcctttcaggaaggaatggctacctctactgatgtgattgatgcagaaaccatgttgtccaaggtgcagattgcttttttgctggcttattataaatatgatgtggcactggcatctctgctctctacttgcggaatgcccgaaagcttttggcagtatagccgtaccggacaaactgagaactttatattcggaaaataataaaaaaagaaaacaatatggaaaaagagaagaaacagttaggagtcgcttttatcgttgttcttgtggccattgttatggtgtctgccattgggattatagctatgagcgataaaccggttgtattgcaagggcagatagaagctactgaaatacggatttctggaaaacttcccggtcgaattgatacctttttggtccgggagggacagtatgtaaagatgggcgacaccttggttgtgattaacagtcctgaggcttgggcgaagttccagcaggtaaatgccttggaagatattgcgaaatttcagaataagaaaattgacgacggtacacgtcggcaaatagtccgttcggtagaagaattgtggaacaagtcaaagagtgacttgcaactggccaaggtgacgtatggccgtattcaggcgctttacaaagatagcgtggtcaccagtcagcggaaagatgaagtggaagccatgtataaagctgctgttgccgccgaacgggcagcgcatcaacaatttttattagtgaaggacggagcgcagaaagaggataaagagagtgcccgctccttggtggatgcggctcggggcactgtgaatgaggttcaggccttgttgatggatgcccgcctcacagctcccgaaaacggacagatatcaaccatctaccccaagcgtggagaactggtaggagcggggactcccattatgagcttggtagtattagatgattgccatgtagtgcttaatgtccgtgaggactatatgccttatttccgtatgaacaagaatttcatgggagatattccggctcttgatgtaaaaaacaaggtatttaaaatcaattacatcagcccgttggggagttttgctacttggcgatctaccaagcagacggggacgtacgatatgaaaacttttgaaattcatgcgctgcctgtagagccgatggaggggttaagaccgggtatgtccgtcttggtaaatttggatgaattgaaatgatagaaggatagctgtgttattctgattgcagtgaatggtaaatataaatgaactacttgaatgaaagaatctccttttatagcggtattgaaacgtgaactggaccgtatggtttcccggcgcatttattttgcgtcgtgtatcgtcttgcctttgttctctatcttctttatggctacaatttttggtaacggacagatggagaatctgcctgtgggtattgtggatggtgataatacagccacttctcgtgagataattcgtatgaccgaggctgttcctactttccgcattactcggcattatgctgatgaagtggaggccagggcagatgtgcagcggaaaagtatttatggatacctcagtattccgtctggttttgaagcaaaggtgatggatggtaaggaaacagctctgacttattattaccattatgcattgatgagtgtgggaagtgagattcacggagcatttcaaagtttgttgaaaagcatttcggtagttcccattgtcactcatgctgtggcactgggtataaatcaggaagagatagaatcttttctgttaccggttaccacacagaatcatccgttatttaatcctgatatggattattcggtttatcttacacagccattctttttcgtttttctgcaagttatcttgttgttggtcaccacatattccattggcagtgaagggaaattccatacttcagccaactggcttgcggtggcagatgggaatatttgggtggcggttactgccaagttgcttccatatagttttatctttatcgttatgagtattctggcaaactatgtcttttttggtgttatgcatataccgatggattgtggtttttgggcgttgaattttacttcggcactattggtcattgctacgcaggcactggcggtttttctgttctctctttttcctgcgttgagtattattatcagtatagtttccatggtagggtcgttaggcgctacccttggcggggttacatttccggtgcctcacatgtttgcaccggtgtactatgcctcttatctttttcctgtccgtcattttgtcgagattggacagaatcttctttatggcaactatggttatgcgtatatgtggggcaatgcagcctgtctgctgttgtttcttattccccctttattgttgttacctcatttgaaacgctctttaatcagtcggaaatatgacgatattgaataatatattagctgtatcttggcacgagtttcgtgtaatatgtacccgctattccattttattggtactcagcggtggcatctttgtgtatggattactttataactatatgtatgctcccaatgtggtacgcaatgctccggtggcagtagtggatatgagtcgcactccgttaagccgcagttacatccgtttgctggatgccactccgcaggcacgggtattgacaaacaatgctgatttgcctgctgctaaggaattgatgaaatgtgatgaagtggtgggcattgtttacattccctcggattttgacgctcgtgtggggcgtggtgaagaagcgatatatattatgtacagcaccactacggcttttctttattttgcttccatgcaggaggcgtctgctggagccatgcttgctgtgaatgatgatgttcgacccgagcaagtggtttttctacctcaggatgatatacagtctgtggttcaaacaaagtctgtcgatgtggtgggtaccgccctgtataattataccgatggttatggtacttatttgatacctgccgttttgatggttgttatttttcagacgttgatatttgttatcagtatgttgagtgggaaagagcgtgaaactggagatatactgatgtttgcaggccctgaaggaagggatctttcttttttacgtatggcatccgtagtgataggaaaatcatttacttatttagccttttatgctttattctctatctttttgttggggcttcttcctttagttttccaattgcctcatttagcatatccgtggaaaattgtggcacttatgataccttatattcttgctaccagtttctttggattggcctgttcgttatttttcagtgatagtgatgctccattgttgttggtagctttcttctctgtaggattgattttcctgtccggagtttcttatccgctggagttaatgccttggtattggcaatggattcattatatggttcctgcggctcccggaactttggcctttgttaagataaattctatgggagctagtatgtctgaaatcagtcagcaatatattatcctatggatacaatgtgcgatatactttgttttggcttgtcgagcctatcgctacaatataaagaaagcaaagtgtgaaagacaataattttatgtgtgattgttttttatgtaattcgttttgctgattctttattttttataagatctgtttggaactggagcgaggagcctgaaggttgttgatattttaattcttggtgattattctcttgttgtttcttttgctttttcagctccttttatgagatgatgcaagggggaaacttgcaaacttgcacaacttgcagtctttccacacacacacacgagcgcgcgcgattacgcgtatgcgtacatcataatagcgatggattattatatcctggtaaagtaatgacggacaatccgatgagagtgtgaagggtagagtggaggaagagatgaagtggtgtgttggcttccatcttttttcctagttctaggtagtgaatggtatggttctatcctgttttttgtaatggggggatgaagaaaatctttctggaggttatggtaaccaatgagcggtaggtgaacagcagccggcagcttttctgacggagtgtctgggcattggacgggatgctatgtgcttttgtatagtttgtgtgttccgtaaggttagtaatgtgtgaccttgtacgttactaacatagaggcctgtatgttagtaacgtaccttgtttaaagtaggtaggaggtttttcgcatgcaggatacgtgtcttccgcagaattatgtgaattgtattggtaaggttaaagtgtgtggttgtcgcagattcagggagtcggtcctttacggtcagtgtctgttttgttctagtccttgtcttccgctttcttattttctccttgtcaggctttcctgctcttttccaccggaagtcttgtcacgtatctccctttccgccttttgcattctgttatcctttcctccgttgtagttctctccggtatcgtccgtctgtcttccactctcttttttatgctttattattttttcatattataatgtacgcgcacgtgtgtgggtgtggaagtgctgcaagttttgcaagtttgcaagtttgccttccgtttttttctttttccgtttttttttacgcgcgtgcgaatattataatgtgtctgtctttttcctcccgtgtcctccgttataaaaaccttctttgtaagacatctgtgattcagcgtattacaaaaaagtttcagggaatccggataatttgtcttgtgaaagtttgcctgttagcgttaaaaggtctacttttgcacccgcaatcgagagagatgcggcacttcagacagtgttactgacttggtgaaacaaacgtgggagattttccttgatagtgatctgcacctggtatcttaccttagcggggctaagggagcgagaacggataagacctcgggaggatgggtggtccgccttttatggaagtttcgaaaaaaaactttttcaaaaaaaactttcgaaaacatttggtggttacgataaaatctcttacctttgcatccgctttcggaaacgatggcaaacaggaataagagttctttgaaagatttaagataaacaaacaagtagtacaagccggtgcaccgtatatataatatggtgtacggaaaaacaagaaccgtcaatatttttattgtattgatagatttggagtccttgagcgtaaagtcaacttaagtgttgaaaagaatatttttacaatgaagagtttgatcctggctcaggatgaacgctagctacaggcttaacacatgcaagtcgaggggcagcatggtcttagcttgctaaggctgatggcgaccggcgcacgggtgagtaacacgtatccaacctgccgtctactcttggccagccttctgaaaggaagattaatccaggatgggatcatgagttcacatgtccgcatgattaaaggtattttccggtagacgatggggatgcgttccattagatagtaggcggggtaacggcccacctagtcaacgatggataggggttctgagaggaaggtcccccacattggaactgagacacggtccaaactcctacgggaggcagcagtgaggaatattggtcaatgggcgatggcctgaaccagccaagtagcgtgaaggatgactgccctatgggttgtaaacttcttttataaaggaataaagtcgggtatgcatacccgtttgcatgtactttatgaataaggatcggctaactccgtgccagcagccgcggtaatacggaggatccgagcgttatccggatttattgggtttaaagggagcgtagatggatgtttaagtcagttgtgaaagtttgcggctcaaccgtaaaattgcagttgatactggatgtcttgagtgcagttgaggcaggcggaattcgtggtgtagcggtgaaatgcttagatatcacgaagaactccgattgcgaaggcagcctgctaagctgcaactgacattgaggctcgaaagtgtgggtatcaaacaggattagataccctggtagtccacacggtaaacgatgaatactcgctgtttgcgatatacggcaagcggccaagcgaaagcgttaagtattccacctggggagtacgccggcaacggtgaaactcaaaggaattgacgggggcccgcacaagcggaggaacatgtggtttaattcgatgatacgcgaggaaccttacccgggcttaaattgcactcgaatgatccggaaacggttcagctagcaatagcgagtgtgaaggtgctgcatggttgtcgtcagctcgtgccgtgaggtgtcggcttaagtgccataacgagcgcaacccttgttgtcagttactaacaggtgatgctgaggactctgacaagactgccatcgtaagatgtgaggaaggtggggatgacgtcaaatcagcacggcccttacgtccggggctacacacgtgttacaatggggggtacagagggccgctaccacgcgagtggatgccaatccctaaaacccctctcagttcggactggagtctgcaacccgactccacgaagctggattcgctagtaatcgcgcatcagccacggcgcggtgaatacgttcccgggccttgtacacaccgcccgtcaagccatgggagccgggggtacctgaagtgcgtaaccgcgaggatcgccctagggtaaaactggtgactggggctaagtcgtaacaaggtagccgtaccggaaggtgcggctggaacacctcctttctggagaggatccaaagtaaaggtttttgtttttgtactgctgttgttgtttattcaagatatgattccgtattaagacggaagcgagaaagtaagaagccgggtctaatgaaacagactaggttgaacttagtcctatagctcagttggttagagcgctacactgataatgtagaggtcggcagttcaactctgcctgggactacgaatcttgagattcgggggattagctcagctggctagagcatctgccttgcacgcagagggtcaacggttcgaatccgttattctccactccatcagaaacgtaagatacgaagatgaccgatctatgacatattgtacaagcaaacagtaattttagtagtaaagagctgaaagtatatatcatcccgctggcacgcaagtgtgggcgaatgaataaggaaagtaaagaagggcgcatggcggatgccttggctctcggaggcgatgaaggacgtgataagctgcgataagctccggggaggtgcaaataacctttgatccggggatttccgaatgggacaacccggcgtgttgaagacacgccacctgatcatttcaggagctaacgcagggaactgaaacatcttagtacctgcaggaaaagaaaataacaatgattcccccagtagtggcgagcgaacggggaatagcccaaaccgttcatgttacggcatgatcggggttgtaggactacgtcgttgcatgaagacatcggagaagaactttctggaaaggaagaccatagagcatgacagttgcgtattcgtatgttgtcgaagcatagtagtatcctgagtagcgcggagcacgaggaattctgcgtgaatctgccgggaccatccggtaaggctaaatactcccgagagaccgatagcgaaccagtaccgtgagggaaaggtgaaaagcacttcgaacagaagagtgaaatagttcctgaaaccgtgcgcctacaagcggtcggagctgcttaaagcagtgacggcgtgccttttgcataatgaacctacgagttgcctttgccggcaaggttaagtgtgacgacacacgtatccgaagcgaaagcgagtctgaagagggcgtatagtcggcagtggcagacgcgaaaccaagtgatctacccttggccaggttgaaggctgggtaacaccagctggaggaccgcaccaataagcgttgaaaagcttctggatgagctgagggtaggggtgaaaggctaatcaaacttggagatagctcgtactccccgaaatgcatttaggtgcagccttgtgggttactgatgtgaggtagagcgactgataagatgcgagggcttcaccgcctatcaagtcttgacaaactccgaatgcgcatcagttttacctcaggagtgagggcatgggtgctaaggtccgtgcccgagaggagaagaatccggaccacctgctaaggtcccgaaatgacagctaagttaaactaacgaagtctgactgctaagacagctaggatgttggcttggaagcagccattcatttaaagagtgcgtaacagctcactagtcgaggagtctggcgtggataataatcgggtattaagttgtctaccgaagcagtgggatcattgaaatgatcggtaggggagcattccagtcagcgtcgaaggcgtaccgcgaggtattctggagcgtctggaaaagcaaatgtaggtataagtaacgataaagggggcgggaaaccccctcgccgaaagactaaggtttcctgatcaacgctaatcggatcagggtaagtcgggtcctaaggctcagccgaagggcgatgccgatggcagaaacggttaatattccgttactacctccaggagtgatgtggagacgcagtagtgacaatgccgccatctgacggaatagatggttgaagggtgtagatgttgatcttggcaggcaaatccaccatgagaatcgaacctgatagtatgccgcgtccctcgggacaaggcaatagtgcatgtaatcatgctgccaagaaaatccgctaaactaaatcctgtaggtacccgtaccgtaaacggacacacgtagtcgggatgaatattctaaggcgcttgagtgattcacggttaaggaactaggcaaactgaccctgtaacttcgggataaagggtccctacccggtgacgggagggcgcagagaataggtccaggcaactgtttaacaaaaacacagggctgtgctaaatcgaaagatcctgtatacagcctgacacctgcccggtgctggaaggttaagaggagacgtcatcgttgagagaagcgttgaattgaagccccagtaaacggcggccgtaactataacggtcctaaggtagcgaaattccttgtcgggtaagttccgacctgcacgaatggtgtaatgatctggacgctgtctcaaccgtgagctcagtgaaattgtagtatcggtgaagatgccgattacccgcgatgggacgaaaagaccccgtgaacctttactatagcttatcattgaatctgggcacgtgatgtgtaggataggtcggaggctttgaagggggtacgccagtatccttggagccgctgttgaaatacgacccttcatttgtttggattctaacccgtgtatatggggacactgattggtgggtagtttgactggggtggtcgcctccaaaagcgtaacggaggcttctaaaggtgccctcacggcgattggtaaccgccgttagagtgtaatggcataagggcgcttgactgggagactgacaagtcgatcaggtaggaaactagagcatagtgatccggtgtttccgtatggaagggacatcgctcaaaggataaaaggtactccggggataacaggctgatccctcccaagagctcatatcgacggagtggtttggcacctcgatgtcggctcgtcacatcctggggctggagaaggtcccaagggttgggctgttcgcccattaaagtggcacgcgagctgggttcagaacgtcgtgagacagttcggtctctatctatcgtgggcgtatgaaatttgcgtggctctgacactagtacgagaggaccgtgttggacagacctctggtttaccggttgtgccgccaggtgcattgccgggtatctaagtctggatcggataagtgctgaaagcatctaagtacgaagccggccacaagattagatttctcagggtcgttgtagactacgacgttgataggatgcaggtgtaaagatggagacatcaaagccgagcattactaattgcccgtccactttccttatattttggatggtgtatacgttcggttattactacaggataagataacgctgatggcttgtcgatatgtcgctcttattcaggtggctatagcacaagggttccacctcttcccattccgaacagagaagttaagccttgtcacgccgatggtactgcgtcacagtgggagagtaggtagctgccgtttttgattgaagaggttgtgtcaaaatgctgacacaacctttttttcatgatttacagtcttcgtatatttccttttgcctatgcggcttttttctcattcattcggtaacaagttgctatattcctgttgtatcgggttataaatagcccaataaacatagatttagcaagtgtaatgaagtcctttcctacctttctcagttttgcgcacatctgtttgatattaaacgctatagcaaagaaagcaaagtccattgtcactttgtcttttcccacatgccggaacctcctgtatgccatgttgtatttcatttgtccgaaaacagcttccggttctatacaccgcctgcctctatgcctgattccttcttctgagagcaacctttcccgtgcctgccgtttatattggtttaaccggtggttgacttctatcatacggttcccccgtgctttaaaacaacttccatgcaaaggacatccttcgcatctttgtgctttataccgggcactttcggtgatgtacccgctcgctgttttgtcacgtctggttcctgtacgtttcatgtgttgccccatcggacaaacgtaataatcctcccccgcattgtaatggagactttccgcatggaacgggttgggagtataacggggacgctgttctttatggaagtagttgtacttgacaaaggcctctatcccgttttcctgcatgaaccggtaattttcttccgatccgtaaccggagtctgccacaccgatacccggtaagcggttatagcggtactggaaggagtggaagaaaggaatcagggtcagcgtatcggtagggttgggaaacagtcggaagtctatgatgaattggttttcagtacctgtttgtaaattatacccgggcttggtctgtccgttcttcatggcgtcttctttcatacgcatgaatgtggcatcagggtcggtcttggaataggaattacgttctccaaggacttcaaggtgattgtcgtattccatcagcttgtcacgatacccttcaagttccctgacttgtttcttcttttctcgcagggctttcttttgttccttgtcctgtgttgcaggttgatgttccagcacttctttaagttcattcactatgccggagagcatggagggagtcaactccacggatgtgtcttttacagagctctcctgtactatggcttcatccacctgctccagaaggatacgaatcttattcagcaaccttgtacggttcctctcaacggtcttacgccagacaaaagtatatttgttggccttggactcaatcttcgtaccgtcgatatattctacatcaagactaatgaaacccttgtcggcaaggacaagaaccaactgcgtgaagacgttgttaatttcctcctttacacggttacggaaacggttgatggtaataaaatccggatgctcattactggcaagccagatataatgaatgtcacgtaaaagaagcttctctattttacgacaagaatagatattgttcatgtaggcgtagataatcaccttgagcatcattttaggatgataagcacaacggcccgtttctttataaagcttcttgaaattatcaagattgagattatcaacaactgcattgactatgcggacagggtcatccgcagctatgttttcatcaattctttgtggaaaaagaatggtttggttgggaatgtaaggacgaaaatgtaactttgccataacgaaaaactttatgcctaaagttacataaactttgggtaataacaaagcccgggcttgggaaagtctgggctttgcgcataaaaaaggttgtgccagcattttgacacaacctctttttttgcatccacgtgtgtggcggagtctagtaacggaaataatcctatgttctgtaacatgaatatggtatatttttctctttttgcagtacttttagtgtaaattctatcattaaattctttttctatcattgatttttgtacttttgggctattctttttgaatttattgaagaaagaaagtgttaaactcaaaaaaatatcttctaagaatatggaaaataaaattcaggagcttaccgataagatttatcgtgaaggtgtggaaaaaggaaatgaagaagcacagcgacttattagtagtgctcgcgatgaagcagcaaagattgtagaggatgcccgtaaggaagctgagtctattctcgctgtggctcggaagtcagccaaggaaactgccgaaaatacacaatcagaaattaaattgtttgccggacaagcagtaaatgcattgaagaccgaaatagctaccttgttgaccaatgaggtagtcagtgaaagtgtgaaaggatttgtggcagataaggagtatctgaataagtttattgtttcattagctgcccaatggtctgctaacgaatctatcgtgatctctaccgcagatgccgaaggacttaagaaatattttgcagcgaacgcaaaagctttgttggataaaggagtgagaatagaagaagtgaacggaacgaaatcactttttactatctcaccagctgacggctcttacaaagtgaacttcggtgaagaggaatttgaaaattatttcaaggatttccttcgtcctcaattagtagaaatgttgttttaaaacgggactatgacaaattattattgcctggtagccggtttgccggatctttcgttggaggatggcaaactgaactatacagtggctaattttaaatcggaaatctattcggaattatcggaaaaggataggaagttaatcgacttgttctatttgaaattcgataatgctaacctgttgaaactgttgaaagataaggaagctgcgacagattttgaggggaattattctcagaatgagttgctggcgcttatcagttcggtgcgtgaaggcgatgctccggataagagatacccatcttatctttatgaatttattactgcttatttggctctttccgcagaggaactctatcgtgcggaagatatgttatctgcctgctattatgcgtatgccatgaactgcggtaatcaatttgtttcctcctggtttgaatttaatttgaatatcaataatatactggctgccttaactgcacgtaaatataaaatggacgtatctcaggtagtagtgggcaagacggatgtgagtgagatggttcgtacatcgaatgcccgagatttcggtttgtccgaaatactggaatattttgagcaggtactccgtatcagcgaaattgaagaattagtggaaagggaaaagaagatagatttgttgaaatggaactggatggaagacgctgtctttttcaactattttactgtggagcggattttcgtgtttttgttgaaactggaaatgattggccgttggatttctatggataaggaaaagggaagcgaactgttccgtcagattattgataaattgaaggacgagatacagattcccgcagaattcagataataaacagattaaagatatatggcaacaaaaggaactgttagtggcgtaatagccaacatggttactcttaccgttgacggaccggtggcacagaatgagatttgctacattctgactggcggagaccggttgatggcagaggttattaaggtagtaggcagcaatgtttatgtgcaggtgtttgaaagtacacgtggattgaaagtgggtgctgaagccgaatttacgggacacatgcttgaagtgactctaggtccgggtatgttgtctaaaaattatgatggtctgcaaaacgaccttgataaaatggacggagtattcctgaaacgcggacaatacacctatccattggataaagaaagagtgtggcattttgtaccgttggtgaaggtgggtgatgaagttggtccatcggcttggttgggacaggtggatgagaacttccagccattgaaaattatggtaccatttcagttgacaggtacttatgaagtaaaatctattgttcctgaaggtgattatactattgaggatactgtagtggttctgacggacagagaaggtaaagatattccggtaaacatgattcagaagtggccggtaaaaaaggcaatgactaattataaggaaaagccgcgtccttataaattattggaaaccggtgtccgtgttattgatacggttaaccccattgtagaggggggaacgggatttattcccggtccgttcggtacagggaaaacagtgcttcagcatgccatctccaagcaggcggaagcggatatcgtaattatcgctgcttgtggtgaacgtgcgaatgaggtggtggaaatctttacggagttccccgaactggtagatccgcatacaggacgtaagctgatggaacgtactatcattattgccaatacctcgaacatgccggtggctgcccgtgaagcgtctgtgtacacggctatgaccatttctgaatattatcgtgctatggggttgaaagtcttgctgatggcagattctacttcccgttgggcgcaggccttgcgtgagatgtccaaccgtatggaagagttgcctggtccggatgcattcccgatggatatctcggctattatctccaacttctacggacgtgcgggatatgtgcatctgaataatggtgaaaccggttctattacttttatcggtactgtatctccagcaggtggtaacttgaaggaacctgtaacggagaacaccaaaaaggtggcccgttgcttttatgccttggagcaggaacgtgccgacaggaagcgttatccggctgtgaacccgattgactcttattcaaaatatctggaatatccggaatttgaggaatatatcgccaaacgtattaatggtgaatggattggtaaggtgaacgaaatcaagacaagattgttgcgtggtaaggaaattgctgaacagattaatattttgggtgatgatggtgtacctgtagaatatcatgtaatcttttggaaatcagagttgattgattttgtgattctgcaacaggatgcttttgatgaagtggattcagtgactccgatggaacgtcaggaagagatcttgaatatggtaatcgacatttgtcatacggaattcaagtttgatacttttattgaggtgatggattatttcaagaagatgatcaacctttgcaaacagatgaactatgctaaatataaatctgagcagtatgaggattttaagaagcagttacaggaattggttgccgagagaagtgtctgattttaatttttaattttaatttataatgagtagagatggcaacaaaagcatttcaaaagatatatactaagattagccagattaccaaggcaacctgttcgctgaaagcgtcaggagtaggctatgatgagttggcaatggttaatgggaaattagcccaggtggtaaaaatcatgggtgatgaagtgactttgcaggtgttcgaaggtacggaaggtattccgaccaatgctgaagtcgtattcttgggcaagtcgcctacactgaaagtgagcgagcagttggccggacgtttcttcaacgcttttggtgatccgattgatgggggaccagaaattgagggacaggaagtgcctatcggcggtccgtctgtgaatccggttcgccgtaaacagccgtcggaactgattgcgactggtattgctggtatcgatttgaacaatacgttggtatcaggacagaagattcctttttttgctgaccctgaccaaccgtttaatcaagtgatggccaatgtggcattgcgtgccgaaaccgataagattattttgggcggtatgggtatgactaatgacgactacctgtattttaagaatgtattttctaatgccggtgcgctcgaccgtattatcagtttcgtgaatactacggagaatcctccggtagaacgtctgttgattccggatatggcgctgacagctgctgaatattttgcagtggaacataatcagaaagtgttggtgttgctgactgacatgaccagttatgctgatgcgttagctattgtgtctaaccgtatggatcagattccttccaaggactctatgccgggatctctttattcggatttggcgaagatttatgaaaaagcggtacaattccccgcaggtggttcaatcactattattgcggtaactaccttgagtggcggtgatattacgcatgccgttcctgataacacgggttatatcactgaaggtcagctgttcctacgtcgcgatagtgatatcggtaaggttattgtggacccgttccgttcgttgtctcgtttgaaacagttggtgagtggtaaaaaaactcgtaaggatcatcctcaggtgatgaatgctgccgtacgtttgtatgccgatgccgccaatgccaagactaagatggaaaatggttttgacttgactaattatgatgaacgtactttggcattcgctaaagattacgcaaatcagttactcgccattgacgtgaatctggatactactgaaatgctggatgttacatggggattgttcagcaaatactttaagccggaagaagtcaatataaagaaagaattggttgaccagcattggaaaaaacaataaattaatgaagaaacatggcaataaagtttcaatataacaagacctcgctacaacagcttgagaagcagctcaaggtccgtgtgcgtacgcttcctattattaaaaataaggaaagtgctctccgcatggaagtaaagagatgcaagacagaagctgccgggttggaggaaaggcttgaaaaacagattcaggcatacgaggccatgttcgcactttggaatgaatttgatgcttcattaataaaagtgagtgatgttcatttgggtataaagaagattgccggtgtacgagttcccttgttggaaaacgtagactttgacattcgtacttacagtctgttcaacagcccgaaatggtattccgatggaatacatttgttgaaaggattggcacagactgctattgaaagggaatttatgcttgccaaactgaacctgctggaacatgcgcgtaaaaagaccactcagaaagtgaatctttttgagaaagtgcagatacccggataccaggatgctctgcgaaagattaaacgatttatggaggatgaagagaacttgtccaagtcatcgcagaagattctgaaatctattcaagagaaaagaaaggaggcagaggcatgattacaaaaatgaagaagttgactttccttatttatcataaggactatgaatgtttcctgcaaagtgtccgtgacttgggcgtagtccacgtggcagaaaaagcgcaggggacagcggagaatgccgaacttcaagagagcatccgtttgtccgaccgctatgcttcaactattaagtttctgcaaggttttaatgctgaattgcaagaacaggagggagatgtagcccgtggagagaaagggctggaggaagtggaggcactacaactggagaaaacccagttgcagcatcagttgcaggtttgcgacaaagagcgtgtcgcgttagaggtatggggagatttcgatcctgcatcggttatgcggttgcaagaagttggatatcaagtgaatttctatatttgctcagagaagaactttaatgaggaatggttggatacgtactatgctacggagattaaccgtattggctcacgcatttatttcattaccataaccaaagaaggatcgttgcccgaattggaagtggaatcggtcaaattgccagtaatgtctttgagtcggctcgctgccagatgtgaaagtttggaacagcaaatgaagagtgtggatgataagttggctgctatagcaggagaaaaacttctttctttgcaagttgcacaagccaatgtccgctcgcagatagaattctcaaaagtggtgctaagtacagaacaggctgcagataacaaattgatgttgttacaggggtgggcaccggctacgcagattccggagattactaattttctgaatcagcaggaggcgtactttgaaattgctgatcctacgccggaagacaatgttcctattcagttgaacaataaagggttctttcgtctgtttgaaccgattatgaagctgtatatgcttcctaaatataatgaactggatttgacgccgttctttgcccctttctttatgctctttttcgggctgtgtctgggcgattcgggctatggtctgtttatggtattaggagtgacagtttatcgtatgttggtgaagaatatcggtgcttccatgaagcccatcttaactttggtgcagattttgggtacttctactttcttctgcggtatgctgacaggtacttttttcggattcaatctatatggtaatgatattccgttctttaacaagatgcgtgatttgttcttcttggacaatcaatggatgtttaatctttcattgattttgggagcggtacagattattttcggtatgatactgaaagcggctaatcagattattcagttcggattgaaatatgcattgtcaactatcggatggattattgtattggtaagtacagctttggcattcctattgggagataccatgccgatgggaggaactgctcatttggtaattctggggcttgccggtgtgctgattttcttgctcaacagtccaggaaagaatattttcctcaatatcggtttgggtttgtgggattcctacaatatggcaaccggtctgctgggtgatatcctttcgtatgtgcgtttgtttgctttaggcctgtcgggtggtattcttgccagtgtattcaatagtctggcggctggaatgagtcctgataatgcaattgcaggtccgatagtgatggtattgattttcttgataggtcattctatcaacatgtttatgaatatattgggagcaatggttcatccgatgcgtctgactttcgtggagttttttaagaattcgggttacgaaggagggggcaaggagtacaagccttttaagaattaaagaatgagaataaagaattaaaagctgtataagctttttcggcattgtcattttgaataaatgttgtattcctgtgtagacagagaagccagaaagggagaatctgaagatagtatgcagatctttcgctaagttcaggatgacatgaaaagtattccttttaggaggagtttgataaaataaagaatttaaaaattaaaaaatagaagaattatggaaatgaatttattgattgcttatgtaggcatcgcaattatggttggtttatcaggtatcggtagtgcgtatggtgtgactatcgcaggtaatgcatctatcggtgcattgaaaaagaatgatagtgcattcggtaacttcttggtgttgactgcgcttcctggtacacaggggctgtatggttttgccggttacttcatgttccagagcattttcggtgttctgactccggctattacaggtattcaggctgctgccgtgttgggttccggtattgctttgggacttgtagctcttttctccgctatccgtcaggggcaggtttgcgctaatggtatcgctgccattggtcaaggacataatgtatttggcaatacattgattctggccgtttttcctgaattgtatgctattgttgctttggctgcaaccttcttgatgggatctgcattggctgcgtaatcagattagtttttttatataggcggttatttcctgtttttatggaaatagccgctttttttattctaatgtaaggcagaaccttaaaaatatttattattgtagctgatatcagtattttttgtgaagattgttagagcgaaatgattgaatgttaattcagaaactgtctgaataacataaagttgcaaaaaaactttattatctcattgaaaatatgtacctttgcgaccgaattaagattagttaatagatggcaaaagaattgttagcccctgattatatcttcgaagcaagttgggaggtatgtaataaagtagggggaatttatacagtgttgtccactagggccaaaacactgcaggaagcattcaaagacaaagtctttttcataggacccgatttttgggcaggaaaggaaaaccctttgttcagtgaaaatgagaatctttgtgcggcatggcgtgaacatgctttgaagaaagatggactgaaagttcgtgtggggcgctggaatattccgggagagcctatcgttatattggtggatttttatcctttcttctctaaaagaaatgaaatatatggccggatgtgggagaatttcaaagtcgattcacttcatgcttatggagattacgacgaagcgtctatgttttcttatgcagccggaaaagtggttgaaagcttttatcgtttcaatttgaccgaaaatgatagagtcatttatcaggcacatgaatggatgacaggtatgggcgccctttatttgcagaaagcggtacccgaaatagctactatttttactactcacgctacttctataggccggtctatcgccggaaacaataaacctctttacgattacttatttgcttataatggtgaccagatggctcgtgaactcaatatggaggcaaagcattctattgagaagcagactgcgcatcatgtggattgctttactacggttagtgaaattaccaacaatgaatgcaaggagttgttggacaagccggcagatgtggtgttgatgaatgggtttgaggatgattttgttccgcaaggccgtacgtttaccgccaagcgtaagaaagctcgtgctgcgatgttgaatttggctaataaattgctgggcttgacgatgagtgatgatactcttattgtgggcacaagcggtcgttatgagtttaaaaataaaggtatcaatgtctatttggagtctttgaaccgattgacccgtgataaaaatttgaaaaaagaggtgctggcatttattaatgtaccaggttgggtgggggaccctcgtgaagatttggtggaacgtttgaaaagcaaagaaaatttcacaactccgttggagtgcccgtttatcacacattggttgcataatatgagtcatgaccaggtacttgatatgatgaagtatttgggaatgtccaattcggcggaatctaaggtaaaagtaatatttgtaccttgttatctggatggaaaggatggcatcttgaatttggaatattatgatttggtgttggggaatgacttgagtgtttatccttcctattatgaaccttgggggtatacaccattggaaagtgtagcattccatgtacctactataacaactgatttggccggatttggtttgtgggtaaattcgttgaagggtagatactgtgagttgaaagatggtgtgaaagttatccatcgctcggattacaactattctgaagtagcggatgttataaaggacaccatatcggaattttcgggattgccggaaaatgtaatcaagactatgcgtaaaaatgcggcggacattgcggaaaaggcattgtggaagcattttatcaagtattattatgaagcttatgatgtggcattgcataatgcacagaaaaggcttattatgaatagctaattaattattaataaataatttgagagacatgaaaatcaaagtaagtaatgcgaatactcctaattggaaggaagttacagtaaaatcacacattcccgaagaactgaagaagttggaggaaatggctcgtaacatctggtgggcatggaattacgaagcaacagacctgtttagagatttagatcctgcgacttggaaagaagtggggcagaatcccgttgctttattggaacgtttgagctatgaaaagctggaggcattaacccaggataaggtgattgtaaagcgcatgaacgatgtatatgctaaatttaaagcttatgtagatgctaagccggatagcaaacgtccttctgtagcctatttctgtatggagtatggtttgacacatgttttgaaaatctattccggtggtctgggtattttggccggtgactacttgaaagaagcatcagacagtaatgtagatatgtgcggtgttggcttcttgtatcgttatggatattttagccagagcctttcaatggatggtcagcagattgctaactatgaatcacagaatttcggtagcctgcctattgaacgtgtaatggatgaaaacggacagccgatggtggtcgatgttccttatttgaactatttcgttcatgcatatgtatggaaggtaaatgtaggacgtgttcctttgtatctgctggatactgataatgaaatgaacagcgaatttgatcgccctatcacatatcagttgtatggtggagactgggagaaccgtttgaaacaagaaatcttgctaggtattggtggtgtgttgctgttgaagaaactgggcattaagaaagatgtttatcattgtaatgaaggacatgctgctttgtgtaatgtgcagcgtttgtgtgattatgtagaaagcgggctgacatttgaccaggctttggaagtagttcgttcttcttctttatatacggttcatactccggttcctgcggggcatgactattttgatgaaggcttgtttggaaaatatatgggtggttatccacagcgtatggggatttcttggcaggatttgatggacttaggtcgtattaatccgggtgatgcaggcgaacgtttttgtatgtctacatttgcttgtaatacttgtcaggaagtaaacggtgtaagctggctgcatggcaaggtttctcaggagatgttctctggaatttggaaaggctattttcctgaagaaagtcatgtaggttatgtgactaatggcgttcacttcccgacatggagtgctactgaatggaagaaactatatgctaagcattttgctcctaacttcctggaagatcaatctaatgagaaaatttgggaagctatttataatgtagccgatgaagaaatttgggaaacccgtatggctttgaagcacaaattggttgaccatattcgtaagcagttcagtgaaagctggttgaagaatcaaggtgatccttcacgcattgtttctctgatggaaaagattaatccaaatgccttgttgattggttttgcccgtcgttttgctacttacaaacgtgcacatctgctgtttactgatttggaacgtttgtctaagattgtgaataatcctgattatccggtacagttcttatttgcaggtaaggctcatccacatgatggtgcaggtcaagggttgatcaagaagattgtggaaatttcccgtcgtccggagttcttgggcaaaatcatcttcttggaaaattatgatatgcagttggcacgtcgtttggtttcaggtgttgatatttggatgaatactcctacccgtcctttggaagcttccggaacatcaggcgagaaggctttaatgaatggtgttgttaatttctctgtgcttgacggttggtggctggaaggttaccgtgaaggagcaggatgggcgttaactgaaaaacgtacttatcagaatcaagatcatcaagatcaattggatgctgcaactatttacagtattttggaaaatgagattcttccgttgtattatgcacgtaaccgtaagggatattctgagggttgggtgaagactatcaagaactctattgctcaagtggctcctcattatacaatgaaacgtcagttagacgattattatgctaagttctatactaaagaagcgaaacgttttaaagaattggtagccaatgattatgcaaaggctaaagaactggctgcttggaaagaacgagttgcagaactttgggattccattgaaatcgtttcatgtgaaaagacagaagagctagctagcggtaatattgaaagcggaaaagaatatatcattacttatgttatagatgaaaagggattggatgatgcagtaggtattgaactggttaccactttcaccaatgcggaaggtaaggagcatatctattctgtagaaccaatggaagtaattaagaaagaaggtaacttgtatacattccaggttaaacacagtttgtctaactcaggtagcttcaaggtggcataccgtatgttcccgaagaatgttgatttgcctcatcgtcaggacttctgttatgttcgttggtttaattaatcattgaattaagataatatttctatttaaagaactgtttccttggaaaagagaggaagcagttcttttttattagtctgttcgcccaaagttctattgatattatcattctagtttttgtctaagccgagattgctatggaaagtgcgtattattgggaagggtgacaggacgagtataaaaaataccgatgcctttctagacatcggtattttactttgtgaactatttttgcagttgttttatttcaacagttcgttcagcttggacttgatggcatcgccgcggagattacgtgctacaatggtaccctcctgatcaaccaatacagtagcaggaattgaattgacgccataaagttttgcacctgcattgttccaaccttgtaagtcagacatttgtggccatgtaatatttagggcagtgatagcctctttccacttgtctgcattttcgtccaaagaaacacctacaatcccgaagcctttatctttgaaagccttgtatgcttctacaacattaggcatttctttacggcaaggtccgcaccagctagcccaaaagtcaatcaaagtatatttatttttgctgacgaaatcagacaggcttacagtttcaccttcaggagtctgcatagagaaatcaatgtatttctgacctacagccgttttctctgaagtttcaatgtgggctttcaacttgttgatacgttcattaactaatgcggcaggaattttctctaccaacgctttttgtttgtcaagttcgaatgcgcctgcataggaaggaagcagatatacaccgaccggattggtgatattggcttcaattgtttgataaaccatatccatgcctacactgtctttcttttcaatctcagccatgatagcttctacctgctcttctgtcaagctagtgtcgctttgagccttttggtacatttcattcatttccttgcttaaagccatgaaaccatctttgaatttttggtaagcgtcattattaggagtacctgaaactttgctttccttacctaaggttacattaatattcccattttcaagaaaaagatcagtaaagtaacgcttgtttcctttcatataagtgatgtagcggtttacagccgtatcttgttttccggtgaatacgaaagttccgcttttgacaatagcggaatcgagttttacaagatcccctcctgcgtattcctgtaaatagattgtgtcgccatcagtgatgtcttctactgaacctgtaaccttataggaaggcgaattctgacatgcaacgaaagccatgcttcctgcagccaataaataaactaattttttcattttaatatgattataatttgcacgcaaagataactacttaattaatatgtttgcggaaaaaaggtttttattttcagaatgaaattaggaatctgtagtttagctttgctttttttgaattttatgggcatttatttaattcctttggtttttttgcacaaatctatggaataaaaagcctaagttcaagcggataatgcaacaggagtgagaatgatgacaatgagaagatacgaaaagaataatttttcagaggaacagagaaagaagatttctttcccttttgttcccctgtggaaaagttgtttctttgcatcttccagttccccaacattcagttgcaatatgaaacagctaaccgaagaacaaaggtataacatttccgcttatctgcaaagcggaaagtcaagaaccgagattgccaatcttgtaggagttcatcgtagcactataagtcgtgaattacgtcgtaatagtgataaacgtaatggcatttacaaaccggatctcgctcaggctaagtatatgtccagaatgcgttcacgaaagcacttcgtgaagtttacggacgacttgaaaattcaagtagatatactcataaagaaagatttcagtccagaacaagtgactgggtttatgcgaacaaagggcttggaaacagtttctcatgagacaatctaccagtatatttgggaagataaaaagcatggagataagttgttatacaagcatttaagaagacggggaagaagtcataagaagagaggtgcattgactaatggacgtggttttatcaaaaaccgcgtggacatagacaagcgtcctacgatagtagacaagaaagtacgttttggtgatttggaaattgacacagtcattggaatgaatcacaaaggagcactattaactataaacgacagggtaactggactagtatggataagactacttagcgggaaagatgccagcccgctaactaaagctgccatcgatgccttggaaccttttagagaccaaatacatacaataacggcagataatggaaaagaatttagttttcacgaagaaattgcacgtaaactaaatatttttgtttactttgcaaaaccataccactcgtgggaaagaggagccaatgaaaacagcaatggtttgattaggcaatacttcccgaagggtacggactttagggacataaccaatgaacaggtaatgcgcgttcaaaacatcttaaactcaagaccgagaaaaagattgggttacatgaccccaaaggaaaaatataaattattaactaacaatgaattcgacactgttgcattgtctgtttgaattcaggaagtataatcctattagaccaatgttattagtgactatcatcctgataatattactctctcttgcattaatcaaagtaattgcaaaaggaaagttttttgattgtaaaataaagacagtagaacaatttcatgacgcgatatggaataatgcacatgagtttatttttttgatagaccagacttctcatgtagtgaaaacaaattattgtactctgtataagcaacctgtcaataaagacagaacttgttttggtgagattttacaatgctgatatgccagagagcaggaaaattgtaataagcatgaacggtgtaggggctgtcctgtccggtataaaataaaggaattgttcaatacccattcttcttttagtaatttggaggtcgtgatggataattgtttctcggccgtcgggtgtttataatatggttatttccgggcgctatttattgctggagaataaatattatgttattttaacagtgcatgatatcagtaaggagcgtgtgttgaagtcatctttgcaacatagtaatgagaaatttctttgtttttttgataatgtgaccgttgggtgtgctatttgcgacaaagatggcaagttggtggaagtgaatgatacttatgtgagatatatgggtaccacctctaaaaacgaggctgtgaatcagcttaatatttataccaatccatgcataaacccagaatttaaagagataatgaaagcgggtgttcccgtatcggaggaagtgaagtatgattatgaaaaaataaataagtattatgtaaggagctgtcataagggtgtgcactattttcgttttattgtgaattacatgtggaatgccggaggagaagtggagaatattttaattatttgggtagagaatacgcttattcataaagcactccgtcagaataatatgttccgtgagataattacttatgcttcttctatttccaagataggcttttgctctcttaatttgtccaagagcgagcaattgatgacaccggagtatttaaagaatttggggataaaggaagaaatagacatgccccggattttttctaatttggaacatgcccatcctgatgaccggaaatttttccttgaatatatagaaaaagccgattatgagagaatggagccgttattcgtattatgacagatggagaatatcgttgggtgaagcaatatttaattcagcaagtttttgatctggagaacagaaatattgttctggcaggagtgaatgtggacattgacgtacaaaaacggacggaagaagctttgcgcatcgctaaagaaagtgcagaaagttccgatcggttgaagtctgcttttcttacgaacatgagtcatgagatacgtactcctttgaatgcgatagtcggtttctttaatttgctgataaatgctgacaataaggatgattttgataactttaagtagattatagagcagaatagtacctttactgttacagttgatcggtgatattctggatctttcgaaaatagaatcgggcacattgaagtttgtatggagtgatgtgaatattaatgcaatgatatacgatttggagaaggtatttcaattacgaaacaaaaataatccggaggtggagatcaggtttgtgcccggtatggaagagtgcgtgattcgtaccgagcgacttatgggggggcggatcggtgttgaattcgagcagggagaaggttccactttttggtttacaattcctcaaaagcccatcattcactttgctgaaagaagagaaatagtacgcgcaatggaaaattattagtcggatgaataaatattactttatttatatcctccattcttgaaaaataccgtatttttgcaactcaattacaaaatgagtatgcaacaatctaattatataattgaggtaaaaggtgtttccaagttttttggtgataaaatggtcttggataacattaatttatatgtaaaaaaaggtgagtttgtaaccgtgttgggtccctccggctgcggaaagactactcttttacgtttgattgccggtttccagactgcttcggaaggcgagataaagatagctggaaaagagatcacgcagacacctccgcataagcgcccggtaaataccgtgtttcagaagtatgctttgtttcctcatttgaatgtgttcgataatattgccttcggattgaaattgaaaaagattcccaagcagactatcgagaagaaagtaaaggcagctcttcgtatggtaggaatgacagactatgagtatcgggatgtgaattctttgtcaggcgggcagcaacagcgtgtagccatagcccgtgctatcgtcaatgagccggaggtgttgttgctggatgagcctttggctgctttggacttgaaaatgcgtaaagatatgcagatggaattaaaagagatgcataagacattgggcatcacctttgtttatgtgacgcatgaccaagaggaagctttgacattgagcgacacaattgttgtaatgagtgaaggaaaaatacagcagatcggaacaccggtggatatttataacgaacccatcaattcgtttgtagccgattttataggtgagagcaatattttgaacggaacaatgatacaggacaagcttgtgcgttttgcaggagtggagtttgaatgtgtggatgaaggtttcggtgaaaatatgccggtagatgttgtggtacgtcctgaagattggtatatttttccagattcggatgcttcacagatttccggtatcgtaacctcatccatctttaaaggtgtgcattatgaaatggtggtcgaggccaatggttatgaatttattgtacaggattatcatcattttgctgtgggtgagcaggtaggtttgttgataaaaccttttgatatccatattatgaaaaaagaacgtgtatgcaatacgtttgaaggagaactggcagacggaacgcatgtggaatttctgggatgtacgtttgagtgtctgccagtggctgacattgagccgggggccaaagtgaaagtacaggtagatttcaaggatatcattttgcaggataatgaagaggatggaactttaaccggggatgtacgttttatcctatataagggagaccattatcacctcaccgtgtcatcggactggggggaggatatttttgttgataccaatgatgtatgggataatggtgatcatgtaggtatcagcatccttcccgaaagtataaaagtaactcaggttgtagaatcataataaagaaaagaggtgctcagaacgatacgatttttcttgtcttcacgtaaaagctggactattccttacgtgatattttcggcggtatttgttattcttccgctacttttaatagtggtttatgcatttatggatgatgcgggttatttcactttgggaaattttgccaaattcttcgctcatcccgaggcaatcaacacatttgtttattctattggcgtggccattatcacaacagtggtatgtatcttattgggatatcctgctgcctatattctgacacagacgcggatgaaatatgcatcgacggtggtggtattgtttattctgcccatgtgggtgaatattttaatacgtacactggctacggtagcattgttcgactttatgaacgtacctttaggagagggggctttgatattcggtatggtatataattttctgccttttatgatttatcctatttacaacactttgcagaaattggataaaagttatgtggaagcggcacaagatttgggcgccaatcctatgcaagtgtttttcaaggctgtgctacccctgtccatgccgggtattgtgagtggtatattaatggtgttcatgcctactatctccacatttgccattgccgaattattgacaatgaataatattaaactgtttggtactactatccaggaaaatattaataatagtatgtggaattatggggcggccttgtcgttgattatgctgttccttattggtgcgacaaccttgctcgcttcagatgataaggatcataacgaaggaggtgggctatggtaaagaaaattttgtgtcagggatatttgtggctgcttctgctattgctttatgcacctatttttatcattatgatctattcgtttaccgaagcaaaggtgctgggcaactggactgggttttccaccaaactctattcatccctgtttgttgcgggtacacatcattcattgacaaatgccttggtcaacaccctgagcattgccttgattgcagctaccgtatctactttgctgggcagtattacggcaatcggtatattcaatcttcgtacccgtgctcgtaaagcaatcagttttgtcaataacattcctatcttgaatggagatattattattggtatatctttattcttgctgttcgtatctttgggtattccacaaggatataccactgtggttcttgcacatatcacattctgtactccatatgtggtgttaagtgtgttgccgcgtttgaaacagatgaatccgaatatttatgaggcggcgcttgatttgggggctacccctatgcaggcactccgcaaggtgattgttcctgagattcttccgggaatgatttctggttttatgctggcggtgactttgtccattgacgattttgccgtgactgtatttactattggtaacgaagggcttgaaactctttccacctatatttatgcggatgcacgaaaaggagggctgactcctgaacttcgtccgctttctaccattatattcgtattggtgctggtattgttggttatcatcaatcgccatgcaagcaagaaaaaggaggtataaaaaatgaggaaaataaataaatggctgatggtgtgtgtgtgtgcgttattttctttaaccggatgttataacacagagcctcgtgaaaatgtactgaaaatatataattgggccgactacattgatgaggatgtgttggcggaatttccccggtggtacaaagaacagacgggggaagatatacggattgtctatcagacttttgacatcaatgaaatcatgttgaccaagatagaacgcggacatgaagattttgatgtagtttgtccttcggagtatatcatagagcgtatgctgaggaaaggtttattgcttcccattgatactgtttttggaaagactcccaattatctacataatgaatctccttatatccgcgaacaattggataaattgagtcggtcggggcatcgtgcttcagattatgccatcggttatatgtggggaacagcaggtatcctttttaataccgatcatgttccggcggaagatgccaggacttgggccagtctttggaatctgaaatataagaacaagattctgatgaaggaaagttatcgtgatgcatatggtaccgcattgatttatgccaatgctggggatttgaaaaaaagtaaggttacggtagaggagttgatgaacaactattcgcaagcgtccatcgatactgttgagaagtatctgaaagcaatgaaacccttgatagcaggttgggaagccgattttggtaaggaaatgatgactaaaggtaaagcatggctgaacatgacctggagcggggatgcggtatgggcgatagaagaggctgaaggagtgggcatccatctggactatgaagtgccggcagagggaagtaatgtgtggtatgacggatgggtgatccctaagtatgctagaaataaaaaggctgccagttattttattaattatttatgccgtcctgatgtggctttacgtaatatggacgcctgtggttatgtgagtgccgtcgcgactcccgagattttggaggcaaagatagatactaccttatcttactttgcagatttaagttattttttcggtcctgctgccgatagtatacaaatagataaagtgcagtatcctgaccgtacagtggtggagcgttgtgccatgattcgtgactccggtgacaagaccgaattggtcttggagatgtggtcgcgtgtaaagggggataatttgggggtaggcgtggttattgtgattctggtatttgccgggattatggtggtattcaccgtgtatagaaagcttcagcgttatcagcatgaaaaggtgcaacgtcgtcgcaggaatcaccggagaaagaaatgacttaatctaaaggaaaacatttagtcttgctgataaaacgatttagggaatccaatctttaggtaaaattaaaataaaagtccgaacttgggaaagtccggacttttatttctataatcatataaagattaaatgatgtattgtgaagagatagactcattattcatcacgcggcggattgtttcagcaaacatatcggcaatggtcagttgcttcactttagaacaacggttagcataaggaatactatcggtaaataccatttcttctaggccggagttctgaacgcgttcagatgcaggacctgacattacacagtgagaagcgatcgcgcggacggaaatggctcccgcttctttcataatatcggcagctttggtaatagtacctgctgtatctaccatatcgtcaattaagatgacatttttattttttacatcaccgataatttgcatggtggccacttcattggctttcaggcgcgtcttgttgcaaagcaccaagggtacacccaaatatttggaataagtgctggcgcgttttgaaccacccacgtccggagttgcgattaccaagtcttccagttgcaatgattcaatgtaaggtaggaatacgccagaagcgtagagatggtctaccggtacatcaaaaaatccttgaatctgatcggcatgtaaatccattgtgatcaaacgatcaatgcctgccacgctcagaagatcggctaccagtttagcaccgatggaaacacgaggtttgtcttttctgtcctgacgtgcccatccaaagtaggggataacggctacaatactctttgcggaggctcttttagctgcatcaatcattagcagcagttccattaagttgtcagagttaggaaaggtagattgaaccagaaaaacatgtgcgcctctaattgattcttcataagaaacagcgaattcaccatcagcaaaatgcatgatgttcatgtttcctaattcgcaaccgaggctgttgcaaatcttttctgcaaggtatctcgaatttgttcctgagaataccataaaaggtgatgttttgctcatttttgtaatagatattacctatttgttaatttgcgtgcaaaggtacgtattataattagaaattaaaaatagaaatttaaaaataacttctcattattgtaacatgtttggtgtgaagcatattcttcgttttttagacttctattctaaattttttgataaatcagtctgctaaatctcttaatttccggaaatgttctatcacgcatcggtaatcgcggtcagtacatgcatcgaatttattccaaagggcgcccaatatggcggctcctccgaaaccaaagtcctttacctccagcaagttttcttcgtcaatgcctcccaaagctatgactttcttgtcgataatgctcgctttggcggcggcacggagttcttcggcggtgtatgccgagttataattcaacttggatatactattgaataccggactcagaaatacataatcgcaaccagatttgtgctctttaacttcgtctagcgaatggcaggaacaactgacatgtcctttgtatccttccggtagattcggattacggccgttcaggtgaattcctttcagtttgtattcctctttcagataaaaatgtccgtgaaccacgatgcgtttgtgatattgttcggggataagggttagcagacgttctgcaaacataggtgccgtaccgggctttcgcagatggagtgtatctagcccctcctcgaaaagagctgtaattattttatcttcctccacaaaataagtggggggtgttattagaattaacttcataccttatgactaattgctaagcaaagatagcaacctatttgtaataatcctagtggatttatagatttatttttgataagcctgtaaatcaataggatactttccctgaaaatgtaattcatgcgatggaaaagttttaaataatgtgtgcgtacctgcatgaaataggcgttttttatttacttttgcgctaataaacaagacgaatagatagaattatgaataaaaaacaatttcttgcagctgcattttgcttgatggcgcttgccggatgtacgcaaaaaacggaattgcctgagaatcctaaagatcaagaagagtaccgtgatcatcagggaaacagttggatttacaacgctatgctgatgcgttgggcattaatgccgtctatggccaacggactttctaccacacattattattatcccaaatctgattcgtggacagatgctaacggaacgaaagtggatgctccttcaaaagtgaatgtggggtcaaaatcgtctgcaaaatcaaaatcgagcggaagtgtttttgggaaaacacgccgttcatccggtgttcatagttaacaggaagcggatatgaaaagaataccagttacgccacgtctggattaccgtgagaaaatagaagcgctggggtttgattttcatggtgattattggcgcgaggaagcatattatcattttacggctgaagaaacagcttgtttggaggaagcgaccaatgaggcgtaccacctgtattgtgaggctgcccaattcattattgaggataacccggaatttatggagcgtgcgttgaatattccgaaggagattggtgagcgtattcgtgcttcttgggatgcggatgagttaagtctgtatggtcgttttgattttatattagccaaggatggtactccgaaaatattggagttcaatgctgatacaccgacttctttgcttgaggcatctgttatccaatggcaatggaaagaagatgtttttccggaatgcgaccagtttaatggcattcatgaaggattggtgcagtcatggaaagatattttcccaaaaaaaggagagatttattttgccggtgcattagagaataatgaagatacaggaacgttgcaatatctggcaagtacggcgatggaggctgggttttctacccgagtattagatatgcaggcgctggatttgcagaatggacgattttttgatccggcaggtgaactagtgaaccggtgctttaaactttatccgtgggagtggatggtggacgaaagtcctgacggatgtctggcggaaatggaatggttggagccgatatggaaattggtgatgtccaataaagcgatccttgccacattgtacgagttgtttccggattctccttatgtgcttccttgttatttgtcgcgccctcggtcgggtttgttttgtaaaaaaccggtcttctctcgtgaaggtcataatgtaagcgttgttgatatccggaattgggaggaacatgtacgtatagctgaaacggagggtgattataacactggagcttatgtatatcaggagtatgtggaaccgacagtgtacagtggcagatatccagttattggctcttggattataggaggagaggctgcgggtatcggtattcgcgaaaatcgtatggaggttacggataacttgtccgagtttgtaccacatattataggataaagtcaaactatttatgtgccagtcggagccgggcgacggatgtcgtcatgcctcggctgttggcacataattgaggaattaaatgtcttttgaatagggccggttcgattcctctaaaaagaaatgagatgggtttccatcgttttcacgttaatcgtccataatttgccgcttagcacttcgccatattcacctataatcttcaacacttcagcggcttcggcgcaacctatcatgccaggggttacacccaatactcctttgggtggatgaggcatggacagcatttctgcttcatcggggaaaaagtggcggtaatcgggacctccccggtaattgaagacggatacttgaccttcgaaggcgcggatggcgccatatacatagacttttccccatttcacacagatgtcattaatgaggtagcgggtagcgaaattatcacatccgtctataatgatatcgtaggtgcggatgatttcatccgcattctctttagtcagtcttgtgggataggcattgatttgcacatcatggttcagggcttcgagacgtttcttggcttggatggctttgggcatacctacctcggcttcactataaagtacttgacgttgcaagttgctgacacttaccatatcatcgtctactaatccaatggtacctactccggctcctgtcaagtacaaggcaacaggagatcccagaccgcctacaccgactataagtactttggcttgttgaagccgttgttgtcctttttctcccaattcagggagaatgatttgacggttatatctttccactttctttgttgttaagttgaaaaaggggctttgtatcattgatacagccccattcctttaaaaatatgggtaatatctatcgcattggtgtgaacttgtcaaaagaaacatcccagtctttccataccggttcccttcctaatgatttcagtgcgttttccacttccatagctgtacgttcatcgcttacatggaattgttccaaagcttgcggataggtatagtatcctcccggttcggttttgctttcagcgctcatggtagtcactccgagtcttgccatgttgtcgcggatttgtgccggctcacgggtggagtaggagatgtccacatcgtggtcgaagatgcgcatggcaaaagtgagctgcgccaattcacggtcattcatgatgacattcggctggaaaccaccgttttctgccggacgcatacgagggaagtttacactgtatttggttttccaatactttttctgaagataacgcaagtgataagccatcatggtcacatcggtgcgccattcttccaatccgatgagtacccccatgcctatggagtggactcctgcctgtcccatacggtcgaagctgtttacccgccactcgaatttggatttcattccgcgtgggtggtatatattataacgggctttgttgtaagtttcctgaaagcaaatgactccatttagtccgtgttctttcagttcggcatattcttcggctttgaggggcattacctctattttcaaattgctgaaatattttttggcgatgtccaaggctttggccagataagggactccggcttttgccggattttctccggtcactagtaataggttttcaaaaggaccaagtcttttgatggctttgtattcatcttcaatctgttcgggggtgaggatggtacgagccatcgggttgctgatatgaaaaccacaatacacgcaagaattggtgcaggagtttgttatatacagcggtataaacatggaaatggttttgccgaaacgttcttcggtatatcttttgcttagttgcgccatcggctctaggtattttgctgctgcgggggagatgagtgccataaagtcgtccacatcgcaatgttccttaccaagggcgcggagcacgtcatgttcggttttggagtagatggctttggtgatcttttcccaatctattttttcaagttcttctgaaaacatgattgttattttttcttgttattgttcataagatgattttgcttttataaaagtctgtttaagcctttccggcattttatcaggcttcaagctataatttccttattatttttctacatttctttttgtcgttttccgtcagttcgggatgttgttttgttcctcccttctggataacgcctttgatagagaatccgctccacttcagaatttcgcgcaacgcttttactacgccgcgtgtctggttaaaccagatattgaatggccatggggtggagcaggtgcttacgatgactgctttcttgcctttatgcaacgcttgagggagccctttcggactttctcccatcatgccgtacacgatgcggtcgaacactactttcatatgtccgttcatatttccccaatagcaaggtgagccaacgatcagcacgtctgcccattgtatcttttgaagcgtgtgctgcgcgtcgtcttcgggtaggacacaggtctgtcggctgcggcaagccatgcatcctgtacaggggtgcacctgcaatttacggatgggtattacttccacttcggcgccacgtatgcgggcttcttcggtcatgatgtccagcatttggctgataagtccttggttacgtgggcttccgttgagtatcaatatcttcatttccttattttttttaggatgttgttgcgggcacattgcacggcgaccgtatagtattccggttccatattttccaagtatgctttcagttctcctgtcagttccggttcttccaggcagatgtcgtaggcaagtttcatgcagacagcttgtccggatgcgctttcggcagaagacagcatgccttgaaggcagaaatcaaagaaagctgcgttgacaggctttgggacaggaagatgatgaaggatattcagtagcagacgtcttgttccgtcatgggggcattgcatggcccgcagcatcagttcctcccttttatccatcaatagggaagggaggaggatgctcagtttttcacaagcccaagtggcatgccaagctatctttgtttcttcatgctgtgtcagagtataaagagcatcaaagcggtcgggggagccggctacttgatccactatgttgtctatgtgttttcttcctaaagttccttcaagtgctttcttgaaatcttccatagttttcacaaagtcagctgtttaattacccacgttcttcaagtcgcggctcagtttcatggcgcagaagttggggccgcacatggtacagtactcaccgtccgtatggcggccttcattgaagtattccaaagcgcggtcgggatccagactcagatggaactggtcgcgccaacggaattcgtaacgtgccttgcttaaagcattgtcacggatctgtgcgcccggatgccctttcgccagatcggctgcatgggcggcaatcttgtaagtgatgacaccaatgcgtacatcttctttgttgggcaatcccaaatgttctttcggggtgacatagcatagcatagcagtgcccagccagccgatttgtgcggcaccgatggccgaagtgatatggtcatatcccggagcgatgtccgttaccagcggaccgagggtgtagaacggtgcattgtggcagtgagagatctggcgttccatgttttctttgattttatgcaaaggtacatgtcccggtccctcaatgaatgcctgtacgtttttgtcccatgcgcggagtacaagttcacccatggtatctagttcggcaaactgtgcctcgtcattggcatcagcgatacagcccggacgaagtccgtcacccaaggatacggctacatcgtattgtgccagaatatcacagatgtcgtcaaaatgctcatataagaaactttccttgtcatgtaccagacaccacttgctcatgatgctgcctccgcggcttacgatgccgcacaaacgtttgtcagccagatgtacattttggcggcgtattccggcatggatggtaaagtaatccactccttgttcgcattgttcgattaatgtatctttataaatctcccaattcagatcctctactttaccgtttactttctctaatgcctgatagataggtacggtacctacggggacaggacagttgcggacaatccattcgcgtgtttcgtgaatgttatcgccggtcgagagatccatcagggtgtcacctccccatttgcagctccacacggctttttccacctcttcgtcaatggaggaagtggtggcggagtttccgatgttcgtgttgatcttcactaaaaagttcctgccgataatcataggctcgctttcggggtggttgatattggcgggaagtacggcacgccctgcggctatttcatcacgtacgaattcaggggtgataaaggtgtcgatgcccagttcccggcaattcatgttttcacggatggctacatattccatttccggtgtaacgatgccagctttggcgtatgccatttgtgtgatggcctttccagctttggcacgatagggcagggcgatgtgttcaaagcgcaggtggtccagacttttatcgtcgcggcgcatctttccgtattctgaagtgatggagggcagttgttctacgtctccccgtccggtaatccagctttcgcgtatacggggaagtccttttttcagatcgatttccatattggggtcactgaatgggccgctggtgtcataaatataaacgggagcattgggcgttgttactttttcaccgttcactatattcacagtaggagtcaggtttactttctgcattcctactttgatgtatgaaaacagggttccttgcatatatgccttttcggcatgagcgtatgctttttgatcttgctttttgtccatcatatttctgtttaatctaagaatgaagttaaaggggatgaggcagatgcgatcaagttctgtcctattgctcctaagcctgcttcataagcgcggcgtccggcaatgacagcttccttgaaggctgttgccatgactaccggctgaccggctactgcgatggctgtattgaccagacaggcgtccgcgcccatttccatcgcttcggcagcatggctgggggcacctattccggcgtccactaccacaggaacggaagcttgttcgataatgatgcgcaggaagtcacgtgtctgcaagcctttgtttgtcccgatgggggcggcaagcggcatgacagttgctgctcctacctcttccagccgtttgcacaatgtaggatctgcctgacaatagggcaatacgacgaaacctagtttgactagttcctcggttgctttcaatgtttcggtagaatccggcaacaagtagcgcggatcgggatggatttccagtttcagccagttggtgccaaaagcctcgcgggccatttgtgcggcaaagacggcttcttcggctgtgcgcacaccggaggtattgggcaatagctgtatgtgagggtgaatgatatgtttcagcatatcatcttccttatcgtccaattcaatgcgtttcatggctacggttaccatttcacatcctgatgccagaatggcttcttccattacggtatttgaattgaatttaccggttcccagaaataaacgggaattaaattctttttcagctataatcagtttcttcattgtattttgtgattttattataaattcatgattcgtttagtttccgctaccgggtctttcgcccggagtatggttccgctcaaagcaatgtcggtgattcccgtttccatgatggaagggatatcttccaaagtaattcccccgatggcgacgatgggcagatggatatctgcctctttcatttgctgaataatggaacggtaaccttctagtcccagcactggagagagatccttttttgtggtagtaaaacggaacgggccacagccgatgtagtcagctccagcttcgtaatgcatctttacatcgtcaaatgtattggcggtgcctccgatgatgaattcttttcctaatattttccgtgcttcggctacgggcatatccttttttcccaaatgcactccgtcggcatgaattttattgaccaactccacgtggtcgtctatgataaatgttgctccgtagtctttgcataagccttgcagacgtatggcttcccgttccacttcgtcaacggaagtgtctttcatacgtagctggatccagcggcaaccgccttccaaggccatgcgtgcggaatcataataggaatatgtgtcggtgaagtgagtgatgaattgaagttccacggtcttatcctccacatgcagctttaatgactaccagactgtcattggggtgtaacacacatttctcccactctatacgggggaccatccggttgtttaccgctatggcgatacctttctcaggaagtgtcagaaaggtggaaagttcggctacggtgcatccgtcctttacttcggtttctttgctgtttactgtcagtttcatactataatatcagtttatgaatttacttgtaaatacaaagagttgctttttgaccggatggtatgaggtaagaagtaacaatcccttcggcggtactaaccgcatcaggttcacagggtataatctcagcccgtccgctgtttacgtggggcacccctttgttttacgatggcaaagatatgggaaagaaatgaataatgctacaacagactgctttattttttgtggaagaatgtttttttatgattatcttgcattgtgcttgtttattcttgtaaaaggatgaatgcatatctgctgtatctttgcatcttaaagcagattgccccgctccctgaatgaataggggcgaggcagccttattatgatgtatagttaagggtccttttatagacgtttttctactacatcccagtcaatgatttcccataacttgttcacatgatctgcacggcggttctggtaatccagatagtaagcatgttcccatacatcgaaacccagcaatggtttcagtcctgcacgccacgggttgcttccgttaggttctttggtgatatgtagttttccctgcttgtctacagaaagccaagcccagcccgaaccgaacagtcctgtggaagcggtgttgaattctttcttgaagttttcaaagcttccgaagtctcggttgatggcttctgctagttttccggacggttcatgcttgctgggtttgggggtgaactgaaggaaatataatgtatggtttaatacttgtccggcgttattgaatatcgctccgtcgggagctgatgtaacaatttcctctacggactttccttcaaattccgtacctggaactaaagagttcaaattgtttacatatgtttgtaagtgcttgccataatggtagtctatagtagcctgactgattacaggttcgagtccgttatttgcatacgggagttttggcatttcgtaagtcataactaatgaaattaaagtggttaataatatattcatttttagtcgaggttttaattaaacttctatcataataacattattgggcatggaattgttctgataaactcaaactttctctatctttgcaggcgaaaggtgaaatttatgacgaattatttagaagaattgaatgaaagccagcgcgatgcagtgctttacaacgagggtccctctttggtgatagctggagcaggttcggggaaaacacgcgtgctgacttataagatagcttatttactggagcagggatatactccttggtctattttggcattgacttttaccaataaggctgctcgcgaaatgaaagagcgtatagcccgtcaggtgggcgatcaggcacgctatttatggatggggacgttccattccattttttcgcgtatcctgcggtgtgaggcacaggttatcggctttagctccaattttaccatctatgattcttcagattcgaagagtttgatcaagtctattgtaaaagaaatgcaattggatgataaaacctataaatcagggttgatacaggcgcgtatcagcaatgcgaaaaatcatttggtttttcctgatgcatatgtttcgaacgcagagctttatcagtatgatttgaatgccaaagtacccgccacccgtgatatttaccggcaatattgggaacgttgccgtcaaagcgatgcgatggattttgatgatttgctactttatacttatatgttattccgcgatcatcctgaaatttgccgtaagtatgcggagcagtttcgttatgtgctggtggatgagtatcaggacaccaattttgcgcaacacagcattgtgcttcagcttacccaggagcatcagcgtgtatgcgtggtgggggatgatgcgcagagtatttattccttccgaggggctaatattgacaatatattgaaatttactcaactgtataagggggccaagctttttaaactggagcagaactatcgttctacccagaccattgtgtgtgcggcaaacagcctgatagagaaaaatagcgagcagataaagaaggaggtattttcagaaaaagcgaagggggagcctatcggagttttcaatgcctacagtgatgtggaggaaggggagattgttgccaaccagattgtgaaactgcgttcacgggaacattattcttataatgattttgctattttataccgtacaaatgctcaaagccgtattttcgaggaggctttgcggaagcgtagcctaccttataaaatttatggaggactttctttttatcaacgcaaggagattaaagacgttatttcttactttcgtctggcggtaaatccgaatgatgaggaggcttttaagcgggtattgaattatccggcgcgaggaatcggggatactacgttgaacaaagttattgatgcggctgcacagcatcatgttagtctttggatggttttggaagagccgttggcatacggcttgaatattaacaaggggatgcataccaagttacaggggtttcgtgaactggtaaaaagttttatagtggagatcccgaaaaagaatgcatatgaattgggggcaatgattgttcgtcagtccggcattatgaatgagatttatcagagcaatgatccggaaaacctgagccgtcaggagaatattgaagaactgataaacggtatgcatgatttttgtgcaatccgtgaagaagaagggaatgagaacatcctgttgacggatttcctgtcggaggtttctctgctgacagaccaggataacgagaaagaggaggatgctgagaagataaccttgatgaccattcactctgctaaaggcttggagtttaaaaacgtttttgtagttgggttggaagagaacttgtttcccagtgctttgtcactcaattcgtataaggaattggaagaggagcgccgcttgttttatgtggcgattacacgtgccgaggagcattgctatttgtcttttgccaagagccggtttaaatatggaaagatggagttcagtagcccgagccgtttcttgaaagatattgatgtacatttcctgaagctgcctcaggaggaacagatggcccggagaatagacgagagagccagccgtttctgtcgtgagcaaaatgaacgtgcgtctcgtttcttgtttgacgaatctgcttcgcagccttcttatgggcgttcttcatcaaatttgtctggtggtcagaaatcattttttgttggagaaagaccgaaagctgagattatccgtcccagtgtgccgcgcaatttgactaaggtaggtcttgctacggtctcaaagccgtccgcggcgggaaccttgccggtgaatgtgctggcagggcaggtgatagagcatgaacgctttggaataggcgatgtgataaaagtggaaggaaccggtgagaacagcaaggcgactgtccgtttccggaatgccggagagaaacaattattgctgaaattcgcccggttcaaagttgtggaataaatattctaatagaattctgatacaaaaatgatagatatccataaagtaccttctccatgctatgtgatggatgaagcattgctcagaaagaatctgagtttgataaagagtgtggcagaccgggccggagttgagatcatcttggctttcaaatcttttgccatgtggaaatcatttcccgtttttagggaatacatccgttatactacagctagctctgtatatgaagcccgtttggcatatgaagaatttggcagtaaggcccatacttattctccggcgtatacggatactgattttccggttatcatgcaatgcagcagtcatataacctttaactccttcagtcagttccggcgtttttattctatggttaaggcctctggagaaaagatatcctgtggtatccgtattaatcctgaatattcggaagtagaggtggaactttataatccttgtgctcccggtacacgttttggggtgacggccgatttgcttcccgagactttaccggagggtatcgaaggcttccattgtcattgtcattgtgaatccagttcttatgaattggaacatactttgcagcacatagaagagacgtttgcccgttggttcccacaaataaaatggttgaatttgggaggggggcacctgatgacacgtaaagattatgatacggagcatcttatttctttattaaaaggattgaaagcccgttatcctcatttggagattattttagaaccgggttcggcttttacttggcagaccggacctttggtcgcttctgttgtcgatatagtggaaaaccgggggataaaaactgcgattctggatgttagttttacttgtcacatgcccgattgtcttgaaatgccctatcagccggcagtgcgtggtgccgaagctttacctgtcgatgcgataaaaacagctttaacggaagagaatatctaccgtttgggtggaaacagttgtttaagtggcgactatatgggtagctggcgttttgaccatccgttacaggtaggagaacgcattgttctggaagatatgattcattacactatggtaaaaacaaatatgtttaatggaatccatcacccttctatcgctatttggcatacagataatacattggaagtatataaagacttccggtatgaggactatcgtgatcgcatgtcctgatggtaattaaaaaaacttttggtttgtattgattatgaggaaattgatgaaataatgtaataaaagtgctataaaaagtatagaaaacttttggaagtttagaaaaaagcactacctttgcatccgcaatcgggaaacagctgagaaatagttaaagaccgaaggcggatatttgcggaaatagctcagttggtagagcataaccttgccaaggttagggtcgcgagttcgagtctcgttttccgctcacataaataaaattttgtgcgttgtgacaagagtgttacacagaatgcccaggtggcggaatggtagacgcgcacgtttcaggtgcgtgtgtcgagaggcatgcaggttcgagtcctgttctgggcactatagcacgagattttcgtttctggaggaatggcggaattggtagacgcgccactttgagggggtggtgacagttatgtcgtgtgagttcgagtctcatttccttcacgaagagaggatatttgcggaaatagctcagttggtagagcataaccttgccaaggttagggtcgcgagttcgagtctcgttttccgctcacataaataaaattttgtgcgttgtgacaagagtgttacacagaatgcccaggtggcggaatggtagacgcgcacgtttcaggtgcgtgtgtcgagaggcatgcaggttcgagtcctgttctgggcactatgttagaggtttgcggaaatagctcagttggtagagcataaccttgccaaggttagggtcgcgagttcgagtctcgttttccgctcaaaagaaaagaccagtgtagaaatacattgatcttttttatttatcatggcgtgaatgtagaaaacggaagaaggtcaaatcaataaatattgatataccctcctcccgctgttttagtcaaatcatccgcaatggaaatatttattgaccaacgctaacattccttccggattatctttcaagtcgttacgtaaagtcagatcgttatagccagttaatttgctgatgattccatcaatcatagtagggctgaacacattatgtttttggaatatttcgcgctgttgctgcaaacaggctgcagaagccgtacagctatcgggaagctgggtcaatgccttcagtttgtctgcattttctttctgatgaatattgacgtttacgtaagttttttctgcaatgtctagtgcattttctatttcaaaaccatggcggcaggctacagctagtcctgctatcagttggtagagatcggccgatccgtccggtgatcgcatttccaccgtttgtttttgtgtggtatcataatggctttccgtttccagtggattggcagtcatgcacatatctgttttagttgcccatcctagaggtacgcgtaccaatactgaacggttgcggtcaccccagcaaatattagttggcgcttcctgatggggaaccaggcggaaataagaagtaggattggtgttaccgaatgcagtgatggatggagcaagttccatcatgccggcaatagctttgcgtgctgtttctgataaaacaccttctttcaacatttggttttgtccatctttcatgatacgcatgtggatatgcaatccggaaccagcttttcctgtagttattttaggcgcgaaagtaatgttataaccatgtttataggccagattacgtataatccatttggcaatcatcaattggtctgccgcatcttcggcattgacaggcaggaattctatttcattctgttcatatatcatgccattcaaggtaaaattacctacttcggagtgtccatactttatttgtccgcctgcttgtgcaatatagaccatgcactgggtacggaaatcattgaacttggcgtatggtgctgattcatgataacctttctggtctgttgcctcgaacatatttgtatccggagcaattacatagtactccaattctcccatagcctgaaattccatgccggttattttattgaatgccttgcatgctttgtgtaaggtatgttcgggtgaactttccaacggctttccatccttgttaaagaaagagcaaagcatggaaagtgtggggatctcggcaaaaggatctaaaaaagccgtccggaatcggggaattacatatagatcactgctgcccgcctcaatgaatggaaataggctggaaccgtccactcgctccccgcaagtcaggatagcatctagatatgcttggttgttgataacgaaattcaatgtcttcagtcgtccgtctccggcgggatacataaagttgaccatacggatgccattctgctgaatgtatcgttttatgtcttctttggtaaactctgcacaaggtttttctagaaatgccaccaattggttagggttcattattaattctttattcatagcaaaattggttgttttttgtttgttattgggttaactttccaaagataacaaaaagttttctgaaaatcctatgaaaagttcatagatattttctttcatactgagtgatattctctttatctttttctgtttgggagaacatcgttttataatttgtcctacctttgcaccgctgttttaaaatataaataagagaatcattatggaaccgatgcataaaattaataaagtagaggtccggaatttacagatcgaagattacatccaattatcacaatcattcaagcgggtgtatgcggataaggatgtgttttggacacacgagcaaatagaaacgcttatccgaatttttccggaagggcaagtagtaacggtggtagacgataagatagtgggatgtgctctttctattattgtagactatgatatggtaaagggagatcatacctatgccaaagtaactggtaatgaaactttctgtacgcataatccggaagggaatattttgtatggtatcgaggtgtttatccatccggattatcgcggtttgcgtctggcacgccgtatgtatgagtaccggaaagaattatgcgagaaactgaatctgaaagcgatcatgttcggtggtcgtattcctaattattataagtatgcggatacgatgcgtcctaaggaatatttggataaggtgcgttcccgtgagatttatgatccagtattgacatttcagctttccaatgattttcatgtgcgtcgtgtcatgaagaattatcttcccaatgacgaagaatccaagcattgtgccactttgttgcaatgggataatatttattatcaggagcctacgcaggattatgtggataagaaaaccactgtacgtgtagggttagtgcaatggcagatgcgcccttataaaacattggatgatgtatttgagcaggttgagtttttcgtagatgccgtttccgattataagagtgattttgttctttttccggaatatttcaatgcgccgttgatggccaagttcaatcatttgggagaagcccagagcattcgtggtttggcacaatataccgaagaggttcgcgaccgttttatcaatttggctatcagttataatattaatatcattacgggtagtatgccatacgtaaaagaggacggagggctttataatgttggttttttagtacggcgtgacggttcatacgaaatgtatgaaaaggtacatgtcactcccgatgagataaagagttggggtctttcgggtggtaagatggtgcagacttttgatacggattgcgctaagattggtattttgatttgttatgatgtggaatttcccgaactttctcgtatcatggccgatcagggaatgcagattctgtttgttccattcctgactgatactcagaacggttattctcgtgtgcgtgtttgtgctcaggcacgggctatcgagaatgaatgttttgtcgttatagccggtagtgtgggtaatttgccgcgtgtacacaatatggatattcagtatgcacagtctggtgtatttactccgtgtgatttcgctttccctactgatggtaaacgggctgaggcgactccgaataccgaaatgattctggtttcggatgttgatctgaatctgttgaatgaattgcatacgtatggcagtgtgcgcaatttgcgtgaccgcaggcatgacctttatgaactgaaggtaaagaaataaaaaatgtttcattacggattacttaggttaacgctggtttatagataagtggttattattttatatttccactttacttttaagaataatctgtgttaatcagagtaatcctgtgatgagctctgttatttcggaataaaaggaactatgggccattcaataacaaacagagtttttccttgtccgctttcctgtaaatagagattacccccatgtctttttataatctgccggcacagactaagcccgatccccgtcccttctgtttttgtagtaaagaaaggaacgaatattttttcttgtaactccatagggattccccgcccattgtcaagtagttttatataaagtttgtctgttacctccagtgttacttctatttgtccgtctgtctttccttccaatgattgcatactgttcttcagcagatttaagaaaacttgagagagttgcttctcatcgccctcaatatatatgtcagaaggggtactgcgcagaatgaaatggatatgggcattctcaaaatcagattgtagcaacagagccagattgtgcaatgaatcggtcagtgagaatcgcttctttttcggttccggcatatacgataagcgtcggtatgattctgtgaattccatcaatctttcgctctgttcacaaatcactccaagtcctcgtattactttctcgtccgtaccgggacgcaatgaaagtgtttgtgacagggaaacaataggagcgatggtattcattatttcatgagtaagcacccgggtcagtttgctccatgactcactttctttctcactcagttcattgctgatatctttgatagccaacagggtaatcgtttctgaatttagtttcatccggttcatggatagtgacagctgtttttttgagttggattgtaaaagaaaagaatcttccacatttccatgggctatgaaatctttcaaggccggatattgctcttccagttggcggaggaatatgattggctcaactcccagcaaacgtaaagctgcgccattcacaaatatgactctcttttcggagttccacgctagcactccattcggtacttcttccagtaaagagtaataaaagttctcctgtatccggctctgcgatttcgttgtggcaagcaattcattgatccggtttagtgaatggctcagtgcattcatttctttatctgccgattgctcgttgaacaatatcatgttctctttatcttccaccgcatccagaaatatccttattttggtattgaacttattcaaccgttttaccaaagctccgattaaaaaaagcgaaaagatgaatagcagactgcctagaatgagggcggtatgtgtaatgacaagtgcgatccctgctccggctacagcgattattaataagatgtagctcaggataaccatatatagatgtttgctgaataccatgattatcagagcttgaagcgttttatcttattgtaaagtgtctggcggctgatgcctaactgttcggctgttgccgtcagatttccatcgttttgacggatagctgttgctatggcctgacgttccacttcttccagattgggtacggtagtggagaattgcgggttccaggtttgttttacgaaaatgtctttaggacggatgacatttccttcacataagatgatcgctttctcgatggcatgttgtaattcccggatatttcccggccaatgataagaacataatttctccaaagcatgttcatgcaaggaaatatcttttttttcgtatttggcggcataacgttgcataaaataatcaatgaataaatgtatatcgttcccccgttcccgcaaaggcggaatttccaggtggatggtattcagtctgtacaataagtcctcacggaaagtcccggaatccaccatctcctgaatattcttgttagtagctgaaagcagccggatatccactgggattactttattactgccgatgcgtgtaatttttcggttttgtaatacggtgagcaactttgcctgcatggctagagggagatttcctatttcatccataaacagggaactgccggatgccgcttcaaactttcccggccggctctcataggcatcggtaaaagaaccgcgttcatgcccgaacagctcactttcgaataaagattcactgattgctcccatatctaccgttaccatagtatgttcccgtcgtgtggaaagccggtgtatttcctgtgccagcatctcttttcccgttccgttttctccggtgatcaagatattggcgtctgtgcgtgccactttcactaccattttcattaactgctgcatggcaggagatgttcccacaatcattggtgattggcttctatcggggactctgtttttccttttcttaccacttccgaaagcttcttttattttgcataccaaggtccggttgtcccaaggcttcaacaagaaatcggtcgcatcattctttaaagttcttaccgccagttccacatccccgtatgccgtaagcatgactacaggtagtgcaggagctatctcgcggattcgtttcagccaatacaacccttcgttgccgttattgattcctgctgagaaattcatatcaagaataattacatctaccggagaggtattcagaatagacataatttgattcggatgatgggctgtctttatttcgctgaactccgtttccagcaacagttccagcgaggccaatactcctttattatcatctactattaaaattgttcctttttccatagcattttgctttcagaggctaaagatatctgcttttgactgttcctgcaaatgaggtgtccaattattggacgttttttattattttctgtaatgcttttatttaccgtaggggcggtttgacacttggaatgcgtcttcagtccgttttatccgtgcttcaatatttcccttggatcgccctggctttgcggtgtttataatttggacgttataccgtctaaaaattggacgatcagtttatgacttcttttgtaactcgttgattattagtatgtcgtttgttttggcataccatttgatctctattctgtgtctaaaccaaagtaaaatgaaaaataatttgataattgtgtgtttgttgtcgagtttgtctttgcctgtgtgtgggcaaagtacactggacgattgcatacgctatgcctgggaacataatcccggtttcaagaatatccggatagacgtaaaggaagcacgtacagactatgtggctgccatgggtaaatttcttcctcatgtttcagtacaggcggaagtaggcaggcacatcgggcgttctgtcgatccggataccaatggatacactgccgattcgtataatcaagggactataggaatggatatcactctttctttatttgaagggtttgcccggattaatcgtttgcgatatacacattggactaaaaaagagaaggaatgggatcatttggcaaagcaaaatgatctggcttatcaggtagccgaagcctattataaagcggcattggataaaaagctttcagaattggccgctgagcagcttcgtttgggagaacgttatctgaagcagacggaaactttcgtagaattgggcttgaagtcgctttcggacttgcaggaggtgaaagcacgtcatcaaggagatgtgttcagaaagcgttcgtatgaaaaaaatagtcagatgtctttcctttatttgaaagaaatagtaggaatgaaagagggagatactttgtctgtttccttatcagctggtgaagatacacccttattaatgcctcaggtagaaatagaggaaatctatttacaatctgtacacgcgttgccggattataaacggatggagatgtgggaacgagcagcccgtaaggagtatgctgtggcccttgggcagttcagccccaccatcttcgcccgtttttcatggggatctgatttttataattccttgttctcgttacatcaattgcgtgaccattggaataaatatataggagtgggtatttcatttcctattcttagcggattggatcggtatgccggagtaaagaagaagaaattgaatttgcagcgagtgcggaacaatatagaggaagagaaactgcatttacgtaatgaaacggaacaaattgtactttcattacattcgggatgggaagaacatcgacaggctgtcctacaggtaaaagccgaaacacaagtgctgaaagaaacagaaaggaagtgggaggaagggcttgtttccgtattccaactgatggaggcgcgaaatcgcctgcttgccgctaaagcggaaaaaataagagtacgtttgcagtacgaactgacatcacgactggctatgtattatcaaacaggaagttttattaaccactaaaaatatggacacactaattgaacgtaaaaagcgtttcactcccaagcagatttatggaggtacgggagtattattcatactggtactcattctctattttatttttcgtgataccggttcttccatgaccattgacaaaagccgtatcactatcgctacagttacagaaaatgagtttaatgattatatccgcgtgattggccaagtacttcccagccgcatgatttaccttgatgctatagaaggcggaagggtggaggaacgccttcatgaggaaggagcaatggtaaagaaaggggatgcgattttgcgtctgagtaatccgctgctgaatattggtatcatgcaaagtgaagctgatttggcctatcaggaaaacgagttgcgtaatacccgtatcagtatggagcaggaacggttaagcctgaagcaggaccgtatcggtatgcagaaagactttcttataaagaaacgtcgttacgggcaatacaagcggctgatggaggagcaattgatagcgagggaggattatctccaggctacggaggagtatgaagcggcaaaagaacaattgtcggtattggatgaacggatccgtcaggatagtttgtttcgtttgactcagatatccagcttggacgagaatattatgaatatgaaacgaagtctggcattggtacgtgaacgtcttgaaaatctgaaagtgaaagctcccatagacggacaggtgggtaatcttgaagcacaaatcggacaatccatttctgccggagaacatatcggccagattattactgctgatctgaaggtacaggcattgattgacgagcattatgtggagcgtgtcgttcaggaacttcctgccgactttacccgtgacggcgagaattataaattagaagtaaccaaagtatatcctgaagtgaaggacgggcagtttcgtactgatttccgtttcacagcagggcgtcccggaaatatccgggccggacaaacttatcatatcaatcttcagttgggcgatcctgtcaaggctgttctgattcctcggggaggttttttccaaattaccggagggcgatggatatatgttgtggatgaaagtggtaaatttgccgtcagacgccctattaagattggcagacagaatcctcagttttatgaagtgactgacggtctggcttccggtgagaaagttattatttccggttacgaactgtttggagataatgagaaactgattttaaacgaataaaaaacacacgtaagaatgattaaagtagaaaacctctctatgttgttcagcaccgaggaagtgcagaccaaagcattgaatgaagtaactttcgagattggaaagggagaatttgtcgctatcatgggaccgtccggttgtggaaaatctaccttgttgaatatacttggaacattagatacccctacttcgggctcctatctctttgagggaaagcgagtggataaaatgaatgaaaaccaactgaccgctctacgtaaaggaagtattggcttcattttccaaagctttaatttgattgatgaactgactgtctatgagaatattgaactcccattggtttatcttaatataaagccggcagaacgtaacaggcgtgtaaaggaagtgcttgaaaaagtgaatatgctgcaccgtgccaatcatctgccgcaacagttatcaggtggacaacagcaacgtgtggctattgcccgtgccgtagtaaccaatgcccgacttctgctggcggatgagccgacaggtaatttggattctaccaatggggtggaagtgatggaactgctcagtacactgaacaagcagggaaccaccatcatcattgttacccattcacagcgtgatgctgcttatgcacatcgtataatccgtttgctggatggtaagattattgccgagaatcgtaaccgccccatggaatctgataccaaaattgaaattttatgatcatacgaaattattggaatagcgcttggcgtaatctgatgaagaggaaaggtttcagcttcattaatatcttcggcttggccgtaggcatggcatcagccttattgatacttacttatgttgcttttgaatttagttttgacaagatgcatagtaagagtgcccggatttatcgtgtgcaaagtacttttcatgagggggaagctctgacggatgattgggcgactagttcatttggatatggttcggccatgcaggaaaatctggcgggaattgaggattatacccgtgtgggatgtattatccaaccggagcaattggtaaaatatggtgaattgtgtttgcgtgagaatgaaatagcttacgctgatcccggtttcttccgtctgtttgattttgaattgctgaaaggcgaccgcgcctcttgtctttccatgccgggccaggttgtgatcacggaacggattgcccgtaaatatttcagagatgaagaccctgtcgggaagatacttatctttaacagtaatatgggaaaaatgtcttgtgaggtaaccggagtcatgaaagaaatgccttctaattcgcatatacattataattttcttttatcatatgccaccttacctaaatgggtacaggagtattggtacaaacatgaagcctatacatatgtattgctggattcgcccgagcgcaaagaagagatagaacgtgcttttcctcaattggccgagaagtataaaactgaagaggcattgaaaaacaagatttggggagtgaggttggagccattggagaagattcatcttaatcctcaattaggttatgaggccgagttgaaagggaaccgttcggccattatcgcattgattttcggagctattgctattttgattatcgcttggatcaattatataaacctgacagttgcccgttctatggagcgtgcaaaggaggtgggggtgcgcagggtagtgggagctttcccgaaacagcttgtcaatcaattccttttcgaggcatttgtaatgaatctgattgcctttgtcatagctctcgggctaatcgaattattacttcctgcattcaatcagttggtaggacgcaccatcactttctcggtatggttcaccgaatattggggcattttagtcttgctgctttttgtagccggtatttatatctcgggttactatcccgcgcgtgcgttgttacgcaaaaagccgattgtattgttgaaaggtaagtttcagaacagtcgtgccggagagaatacacgtaaaatattggttattgtacaatatacagcctccatgatattgctttgtggtacactgattgtttttgcacaactcaattacatgcgttgccagtctttgggggtaaagaccgatcagattttggtaatcaagtttcccgggcctaccgagggaatgaaaacaaagatggaagccatgcggaaagcgatcagaaagttgccgctggcttcaaaagtaacttgttccggagctgtaccaggtgaagaagtagccatgtttttatccaatcatcgtgctcatgatgcattgaagcagaatcggttgtacgaaatgttaagttgcgaccctgactatatagatgcatacggactggaggtggtagccggacggggtttttccgaggaatatggggacgatgtgaataaattggttatcaacgaaacagccgcccgtatgttaggatatatggataatgatgatgccattggtgaggaaatagctgttgaaacggtaggagagcccatgcaggtaatcggagtagtgaaggactatcatcagcaagcgttgaataaaggttatacaggagtgatgctttttcataaagataagattgattggattcctcagcgttatatctcagtcgtgatgaaaccgggtgatccttcggaattagtatcacagataggagaaatatggaataattactttgcggattccagttttgattatttcttcctcgaccagttctatgaccggcagtaccgtcaggatgaggctttcggcgtattgatgggaggttttaccggattggctatttttatctcctgcttaggtttatgggtgttggttatgttttcttgtgccgtccgcaccaaggagatgggcatccggaaagtattgggggcatctcgttggaatttgttttatcagttgggtaaaggtttctttattcctattattatcgcggttgtgattgctttgccggtagcttggttcagcatgaatgcatggttgagtcattatccgttccggacggaactggaggtgtggttcttcttgttgcctatcgtattgatgctgcttatttccttcttaactgtagcaggacagaccatgaaggttatttacagtaaaccggctcgttcgttaaaatacgaatgataagacataagatgcccatagtcagtaattaaggttgtaattcctgtaattcatttacaaagaatgtcattcccttattgtaaatttgcaaacgaagacaataagtatgataaaactttgaagatgaaaaacaatacaatgattattgcatgtttgtgtgctgtcggtataatgaatgttagcatgctccatgttcatgaaaatatgcagggtactactcgtacgagaagttataaggtagaagaagtggtggttacgggaacacggaatgaaacggacatacggcatttgccgatgactatttcggtggtagggaggcaaaatttggaacatacttatcaaccttccgtgcttcctgctttgaccgaacaggttcccgggctattcactacgggcaggggaatcatggaatcggattgtagcgacaggaacaagatgaatttgccggctatattgatgttcggtaggatatacaaggttggttgtctttaaatgtgggtatgcggattgactatcattcacatgtgggcactgagtgggttctccaaggtgggctggcttttcatcttcccggaaatgctgaaatgaaaatgatggtaagtaagggattccgtaaccccactatatgcgaaatgtatatgttttgcccagacaatccggaattgtttgtccggggggaaaacttgttggcacaacactatgaaatcaacgagggttttcctatacctaagacgacattgatgagtggggtgaatttatttttagattatcttggtattgctcgtgatggatgtttttcagttctagccaataaataattgtttttttcatctaaactttgaataccttttgaatttttctataaaactaatttttcatctaaatttattttattaattttacagcgtttttaatgagagtctaactctctatagttacaaatgagcgatgagaaagggtgtcctgatggcatcctttctcttttatagtatatatctatattgtattggattttgcttatgttacgattatgtgaaatcacgatacgttttttgtatttccgtttctccaacttttagcagacttaattgttattcttgcattaaaaaacaattggatctccctttgttatatatttaacactcttttcatctctttttgttgaacaatctatgcgattcgcgtgttaatataatgtgtttttcatagtaatagatttaagattaatagttagtatttgcttgtgaaagtcagtacacttacggataaaagcgtttatccgaaaagaaaagagaggcaactggaaacggaagcctctttctttttgaggagtatcgtttattcattgtcgcttttgaataaaacattttttatttctgatataaaaaagatagcgtgagtaaatatcacgtcaagtataataaatgttataatcttaccgatacccaatcgataaatactaatttagctaatataatgcctgaaacggcttgtgaatggttacaatcattctaaataaagtaagataatatattgaaaaaaagagaagctgtctcaaacttgaatgcaagataagacagcctcttttttattgtttcatttcacgcaacgccttacataattgatccggacaggaagtagaacggtttccgcatcttacaccttccagtttctgtaagacctcttccactttcattcctttcaccaatcggctgataccttgtaagtttccattgcatccgccccaaaagaaaacttgttgaataacgtcatcttctacttccacttcgatgtggctgctgcaagtgccttgcgtcttataggttattttcattttattcttcctcttcagatgcaggtttcatgtttgtataaacggtctgaacatcatcaaattcttccagacgctctaccatcttgtctagagtttcacgttgttcaggagtcacatcttttaagtcattgggaatatatgtgaaatcaccacccacttcttcgaaaccacattcttccaagtgtttctgaattgctgcgtagctcttcggatcaccatagatggtgatagttccttcttcttcatcttcgtcgaactcatcctctacattatagtcaatcaaatccaggatcagttcttccatatccattccctctttcttcttgaaagtaaatacacatttatggtcgaacaagaaagctaaggaaccggtagtacccaagtttccaccgaatttgttgaatactgaacgcacatctgctacggtacgggtagtgttgtctgtcaatgtatcaacaaatacagctactccgtgaggaccatatccttcgtaagtcatacctttgtagtcactggtatctttacccattgcattcttaatggcgcgttcaatgttatccttcggcatgttttcacgcttacaagtagcgatcacaccacgtagggtcgggttattttcgggttccggaccacctgcttttacagctatagcgatttgtttacccagtcttgtaaatgttttggccatgtggccccatcttttcagctttgtagcttttctatattcaaatgctcttcccattggattgtagttttataatggttatttttattattatcttagttttgcacctagtttgttttctaggttagcaatcagtttggacatgatcttgtcaatctgtttgtcgttcagtgttgcgctttcatcctgtaacaagaagctcactgcataactttttttatccggttccagattcttgccttcataaacatcaaacaattctacttctttcagcagtttcttttcagtctcataggctattttttcgatttctgcaaactgtatgttcttgtcaatcaacaaagccaagtcacgtttcacagccgggaacttggaaagttctttaaagttgactttagccgacttgatggctttcatcagttctttccagttgatttctgcataatatacctcattgtctatatcgaatgctttttgaatcttcttgctgatgatgccgaaggtggccaataacttgccgccacgtgtgtgtacgctgatggctgttgaatagatatcgttggtcaggttaccgaataccacgttgccgaaattcaatcccaaacgggtaaagatgttcagcacgtatgcttttaattcgtaaacactgctgttttcatcgggatgggcccatgaattgctgacgcgtttgccggttacccacaatcctaaatgatattcttcagcataagccgcaagcactttttccggttttttcttttctgcgttataaaaatagcagttaccgaattcaaagaatttcaaatcggcgttcttgcgattggcattgtgctggatgctttccaaaccaccgaataataaagtttgacgcatcacgttcaaatcgttactcaatgggttcatcaagtaaaccaaattttcgttcttgtatgtttccaatccttcgtaataggaagcggcggtcagtgaattgttcagtatttcattgaaaccacaacctaccagttgctctgaaatcagattttgtaatttctgggagtaatccacttcacctttggtggtcaggctggatttcaaggtagtaggaatctccacattattatatccgtagatacggagaatgtcttctactacatcgcaatcacgttgcacatccacacgataggggggaacttgtaaagtcaagcctccgggtgtttcgttcacaatcttcatttcaagactggtgacaatgctctttatggtttccaccggtatggtttttcctatcagtgagtggactttctcataattcagctctactgtaaaatcggctatcggggcagggtagttgtctttaatttcagaagaaatagtacctcctgccagttcttgaaccagtaaagccgcttctttcaatgcataaatagttccgttggggtcaataccacgttcaaaacggaaagaagagtccgtactcaatccatggcgacgggctgttttacgtacccaagtcgggttgaaataagcgctttccaaaaatacatctactgtctgctcggttgttcccgaatccagaccaccgaatacaccggcaatgcacatcggttcttctgtgttgcatatcatcaggtccttgtcggataatttgcgttccacttcgtccaaagtaacgaatgtagtaccttcggcaacagtcttcactacaatcttcccacctttaatcttatctgcatcaaaacagtgcaggggctggccgtatgcgtgaaggatgtagttggtgatatccacgatattattgataggacgtactccgatcaggcgtaatttgttttgcagccattcgggactctcttttacagttaccccttttatggaaactccggcataacgcggacatgcttccgtattctctacttcaatggcgatgtccatatcatggttatccactttaaacgcttctacagacggacgttttaaagtggcttgtttgccgttttgaatcaggtaggcatacagatctcgggccacgccgtaatgtgagcaggcgtccgcacggttcggggtgatatccacttccagtacgtattcgcttttgatattgaaataatctttagcgggagtacccggaacagcatccgccggcaatacgatgataccttcgtggctgtttccgataccgatttcgtcttcggcacagatcatacccatagattcaactccgcggagctttgatttcttgatggtaaaacattcttcgccatcgtatagtttggtgcccaatgtggcaaccaccactttctgtccggcagctacgttagcagctccacagacaatctgtaccggttcgccttgtcccaaattcacagtagtaacatgcatgtggtctgaattgggatgaggttcgcaagtcagcacttcgccgatgacaataccttccagaccacctttaattgtttggacttcttctacgcctccggtttccaaaccgatggaagtcagcgcttcggccacttcatccggtgtcaaatcgaagttgacgtattctttcagccaattataagagatattcatatatgatattttttatgtatttcaaaatgacctgcaaatttagtaattattttcttttatcctgttatttatccatcacagattactcagattaacacagatttttctttgagggaaataatccgtgttaattctgtgagggataaataaatgtcagaacggtaaaggtccttcgggaataggggttccgaacggattattgtcggcaggtgcggcatcaggagatgggggaggtacattgttgccgccaccgttcattttggaacggataatacccggcgcctcacccggcataggcacgataacatcatcgtccggattctggaagcgggcgaattcgccacggaaacgcagcagtacatcacctacggcaccgttacggtgcttggcgataatgatttctgccataccgtgcaggtcgttccctttttcatccgagtagattttatagtattccgggcggtggataaagcataccatatcggcatcctgctcaatagctccggattcacggaggtcactgagctggggacgttttccgtcaataccctcacgactttccacaccacggttcagctggctcagtgcgatgatggggatgttcagttctttggctaaccccttcagtgaacgtgaaatggtactgacctcttcctgacggctgccgaatgacattccgctggcattcattaactgaaggtagtcaatgataataatttttactccatgctcgcgtacaagccgtcgtgctttggtgcgtaattcaaagacggacaaggatggtgtgtcatccacatacatcggtgcatcgtataattcttttattttataatccagttgtccccattcatacggagccaactggccactcttgattttctcacccggaatttcgcacacgttgacaatcatacggttgaccaactgtacgttggacatttcaagagagaacaaagccacagggattttcgcatttaccgccatgttctttgccatggaaagcacaaaagccgttttacccatagcggggcgggcggcaataatcaccaggtcggaattttgccagcccgaggtcattttgtccaatgcatggaaaccgctttccagaccactcagcccgtccgttcgtgccgccgctttttgaagcatctcatacgcttcctgaatgacagggttgatttgcgtataatccttcttcatgttctgttgcgagatttcgaacagttttccttccgcttcctgcatcaggtcgtccacgtcttgggtttcgtcgaaagcctttgtctggatgttgctggtaaaggtaatcagttcgcgtgcaagaaacttctgcgcgatgatacgtgcgtgatattctatgtgtgcggaagaggctaccttgccgcttagctgtgttatgtaaaaaggaccgcctgcatcttccagttcaccggtgctgcgtaattgttcggccacagtcaagatatcgacaggttgctggcgtaaagccaatgaggtaatagccgaataaataagctggtgacggcgttcataaaaagattcgggacgaagaatctcacttactaatgagtaagcatctttttctatcattaaagctcccaatacagcttcctccagctcaggtgcctggggctgtaaatgtccgtattcgtcaacaggctttgctttcgaagttttgggagtacgtgtcatttttctcgtttctgccattgtcgtctgtttaaagtagggcaaagatagaactttttgctgagttgggcactcgtccattcccaaaaataataaaagaaatatgaacctgaatctacggagaaatgaacaatctggacagtaaatggtttttttatatggtaaaatgaaaagtttgttctatatttggcgctctgtccggataaaagatggcgtgcatctttgtagaacgggcaacaatctaacgaaacacactaaaaataactatttaaagaacagaatatgattacatttcctaatgcaaagattaatttgggacttaatattgtagagaagcgcccggatggataccacaatctggaaaccatattttatccgataaacctgcaagacgctctggaagtgacgcggcgggaaaacaatgacaaagaatacactttacacataagcggatctcctttggagggtgaacccgaagataatctggtagtaaaagcctacaagttattaaaaaaagactatcccggactgttgccggtagatatacacatgtacaagcatataccggcgggtgccggactaggtggcggatcatcagatgccgcttgtatgataaagcttctgaatgataaattttcattgggactcagtacggaacggatggaggaatatgctgcaaaactaggggcagactgtgcttttttcattcggaacaaacctgttttcgctaccggaatagggaatctgttcgagcctgtggaattgtcattaaagggataccacataattttgattaaacctgatatctttgtgtccacccgggatgcgtttgccgaaataaagcctgtgcgtccggctgtttctttgaaagaaattgtaaagcaacctatagaaacatggaaaagcagtatgaagaatgattttgaagatagtgtcttcaaaaagttccctgagattgctgctataaaagatgaattgtatgatttgggggcagtgtatgctgccatgagtggctctgggtcttccgtctatggtattttcgaagcaccgatagagaatgtggaagataaattctgtggatgtttttgcaggcagagagcgttggaatagtgtggtagatcagtggttagtgattagtggactgcgctgtcatgccgcaggtattaaccactaaccactatagtctatcttttacatagtgccttgaaatcacaataggtacatttttctatgatttctgtttgggtaaatgatttttccggattaaatatctcttctaataatccttgaagtcgttcacgatattctttttcatatttactgaaatcttccacagcctctttgggctttcgtggctcgcccatttgtataacgggagaataggtttctgtagcggcccgatgaatatagagaagggccggagctatcttcatcgttggttgcttgcggcacatgatggcggcatacaggaacgtctgaaatacatagttggaacgtttcttgtccggaataaacagagattccacatggggtggggtgtctgcatcaccacctgtcttgtagtccacaatacgaagtgtgccatccttgctgtccatacggtcaataattcctccgatacgtgattttatgactcctttgggtgtttgtatgtcgatgggttcatccacttccatttccgatgcaataaaagtgaagggagcgtaacgtaaatcattttgtaaaagttgttttaaatatcttgcaataacggcagagttgataagttgtacgccgttatattccggtttttcgttttgcggaacattaaagaataattttttgaatgctgtatccacataatcttgcagcttcacttcattgcgtagcaacgtttccaatgcttccttattaatgactttgccatgagtggtcaggtctttataaatatgttcggctgcgtaatggaaaatacttccgaatgtggcggaatctatttctgcactcacttcatcgggggcggagaggccggctacatacctataataaaattttaaaggacaatccagataataattcaaggctgatggagaaaattttgctttgggattggcacggacatcaaacaggctttgcatctggcgcatgacatccggggtcttttctacagtgatagacgaggtgccttggggggactgtccggcctccagaaactgacgtgtgatggggtgaggccattcaataaggaattgcagcatgaaacggctccattcgccgcggttcagtccgtccgaactggtattgtaaattaaggtaatcctttctgcccgttgcagcagacgatagaaatagtatgcatatacggcaattttatgctctatagtagtcattccgaaagctttgcgcaggttgtaaggaataaaggaagagtctcctcccgatttgggaagctgcccttcattgaccgatagtaataccaagtggcggaaatccaggttacgtgtttccaatacccccatgacctgcataccaatggccggttcgccgtggaatggaatattagtcgttgataagaccttgaccagcaatcgccggaatgtttcgctttgtacggttaattcatcttcttctatcagtgtgcggaaccggttgatggtggtataggctttgaaaagcgattcccgataaagttggttgaatgcatctgtgtcctcggtaccggaagtgtttgcctggtaaatgcttgccacttgctgcaaagtttcggacaggcgtatgcacagattcaggtttccggaaagcggagtgaaaagccgggtcaggaattcatctttgcccaattcgccgggtaacggatagaaacggttgtttcgggtcagttctttctccaacaattcggcttgaccggtgagttggcgggtataggggtgttttaacagtgtaacaactgattgaaacgtgtagcggccgcttttgaaattaaatccgtgggtatgcaactccagtaaggcgatgaggaaactatatacaggagtttgcgataacggaaatcccatggtgatattgacatgttttacttctgccggcaatgaatggaggaccggttgaagcaatgcttcgttacacaatacgactgcggtttccttttccggtgtagtcagattgtttcgtatccattgaggcaggtaacgggcttgtgcattttcagtggaagatgcgatgtagtgtacctctttaggtttcgagagatttttgaataactcaccggacaaaggagaaggaaagtcgcgtaagttccggcggataaactctccggcttcatgggtgacggcttgtctgttttccttcatataaaattcgtcgtaatcccaataaaaaacagcttttccggcatctttcaattgggtgaacaacgtatgttccactttgttcagcacattaaatcctacaaaaatatatttctcgtatggaagtttgtccacatccagatgctctatgacgtgacggtacatcattccttcgtaggcaatgttttgagaagctaaggattcacggaaccctttgtagatgttccccaatacgttccataaagagataaaccgttctttcagcgctgttctccgttcgatggagaagttctggaagaactgccggatagcttcttcctgctcatcatcaatgaaggtgtagtcgtccattatgttgcgcagatcctgtaaattggaaaacagtttgtcggtatccactctatttttgtcggcatcgtcaaaatcactgatcagcatttctccccaaaaatagaaatcatccagtgtttccgtactttgagtttcccgtcggaatatcttataaagttcgcataccagttttaccggatcacccacttcccatggagaaagactacggaacaattcgctgatgctgacgtatgcgggcgaccaaataggtgagtccgactcttgggcgagatactcattaaagaaaagtccggcacgtttgttaggaaaaaccacggctgtatgtgccaggtttccttccgtatgtttatataaatcggctgctaccagtttcaaaaagctttccattattctatttcctccagttcgttgttaaatacataccataaatagccacggatatgctcatatcccatgtctgataataaatccatatattctttcacctgcttgttgtaagccttccgctttttaccgaatttaaagtccaccacaatcacctccccgtctttcatcatcacgcggtccggacggcgggtttgcaggactccttttacccgataaataatggcacactcattgtatagttcccagcggcccgaataccattctttgaccagcggatgcctcaaagcccattcggtgagttttcgtatttgttcctcttgttgtgccgactctatgattccttcgaaacgcaggcgttctatggcgggaggcacatcgtccgtggtacggattacggagaatagattatgcaacaactgtccttgccggatgtatttgtcttccgtttcctcttctccccggataaattcggcagaacggttggactgtttgaattcgatgttggtttccagcgtttccagatggataggcaaacgtcgggctacagtcagcagcttgttgccggacacttgtttttcctcttcgtgagatgagagatagagcgttcccagttcgtatatttcttctccggtggcatagctctttccggtcatgtcggataaggcatttcctaacaattcggataccgttcctttctgttccgcctttccatatataatcaagttctttttggcacgggtaaatgccacataaagcaggttcagattatccacccataattgcaagcgttcattcaggaactcttcccgataaatggattgctgcatggctgtggaatagttgatgggaacaatgtcaagatcgctaaacggagcttgccggggagcacaccataccagatggttgtaagtctcattctccattttccagtcgcagaagggtagcagtacggtatggtattccaagcctttggacttgtggatggagagaatgcgaattccttccacctcgccggaagggatggtcttgctgcctagtttttcttcccagtaggtgataaaagcggataattcggaagaattgctttgcaaatattccgtcacggcatcaaagaaggcgcacagataggcatcctgttgtttgatgcaggacatctgaaacagattgaaaagtttttccatcagttcatacagtggcatgaggcgaagctgttccgcttcttttatgaaatcgaatggcagataatcatctatttcgttcagcaatagagtgttgagatctattcctttatgtaatacttcattctgataagcagcagccagttgcgctttggcaatccggtttccgggttgtgacaagtagcgcaggctatccattatcatacataccgccagtgaggcatccagtcggaatgcctcatcggatacgattttgtaagaggtgttcttgtcgaagtaatcggctattaaaggaatgcttctgttcttgcgcaccaggatggcaatatctttcagttgcacgccctgcgccacaagtagctccacttcttctcctaggtggtacagggtgttttccatataggtcatgtcttccgtatccgatagaaattccactttgacatacccttttccgggatctttgtatgtttcctgacacacgtcgttgtaggcttccttcagttccttgcattcctttttttgttcttccttataaatgttgttcaacacctcgcaggcggctgtaaacacttcgttgttgaagtgaatgatgtttgcagcgctccggcggttggtggtcagtgtctttactttgacgggaaaggcttcgatgtttgttttcagtccgttcagtatgccccagtcaccgtttctccagcggtagatggattgtttcacgtctcctacaatcaagctgtctgctccctgagacaaaccttcgagcagcaacagacggaaattgtcccattgcatacgcgaagtatcctgaaattcatcaatcattacgttgcgtatggttgttcctatcttttcgaatacaaacgaggaatctccttcttttaccaggttatgaagcaacgcgttggtatccgacagcaggaagcgattgttctcatggttcaattcgcgtacctcttcgtctatattggccagcagacggatattgtttacgtggcgcagggagagttggcaggaattggccagcatattgttccggcttctatatttttccgattcattcagcaggggaatcagttctttttctgccaggcctatgatagcgttgcgtatgggggaggtttttttcacccattcgtcggggcagtccagacatttttccactgttacattgcggacgctgtcatccagtttgcccgattgtagtttattaaaatagccggctatacctcgggaaccgtttttcaaatcttctactttcaccccgtttgtatccaatattccgaagaattggtcggcaaatcctttcatttgttcctgcacctcttccaaaatggcttgcagcgtcttgcggtaattcttgatacagtctttgtcccgtaatttttcccgtagcccatttcctttttctatatatccttcatcgaagatgtttcgtccgaaattctttatctcaccggaaacattccacctcttgtcatcggcaattctttcttctatgtattccaacagccaatagagtacgggagattgtcggtccagcttttctatcatggagtccacggcatcactcagtacctccatattgttcagttcgatattcagattggcacccaattccagctcccgtgccaaattgcgcatcaccgactggaagaatgagtcaatggtttccacccggaagcggctgtaatcgtgtatcatgtagtgcagtgccgtaccggcggctgtccttatgtcttctgggggcatttccagttcttctgtgattttctgtaaatagggatcagaatccttatcctttatccatattccgtatagctggctcagaatccgctctttcatttcggtagtggccttgttggtaaaagtcacagccagtatattacggtatgcccgtgggttctgtatcagcagctttatatattccacggccagtgtgaatgtttttcccgaaccggcagaggctttataaactaataattcaggagaatgtttcattttaaataatttgctaatttgctaatggctgcgctgtgtaccggatggtaattggctgacacattagcacatttttatttttaattaaaaaccagtacaaaaacagtggcctgtcccttttccttgtaaggcagcagggtcagtgtgccaccgctcagcctcatgatttgtttgcttagactcagtccgatgccgcttccttcctctttggtcgtgaagaaaggtacaaaaatttgtccggctgcatcgggaggaatagcggggccgttgttggctatctctatacggatactttcttgcggatcacaataagctttcaaggtgatctttccgtcgggagcattacctatggcttgaatcgcatttttcagcagattcgtaaccacttgggctatcaggttctcgtcggcaaagactatcaggtcttcccgggcttcgaggatggaaagagtgatgttggggcatggatgctggtgctgtgccagtcggatcatccgttccaggaaaggacggacatagaacagcgatggttcaggtgatggcagtcgtgtcagtttgcgataagacatgacaaaatttatcaatcctttacctgtagagtgaatcgtttccagcccttgtttcatttcttcattttctgctccgggaagagccagtagtgtttcgctgagggaagtcaccggagtgagtgaattcattatttcatgagtcagtacgcgggtgaggcgtatccatgaatctatttcccgttcatccagctcccgattgatatcactcaaggcaataatgcggagttcctcgtctttgatacggatgccggacacccgtaaggcaagatgtactgttccccgttctgtgttgaactgaatttgcagcttgtcacccggaactgctttttccaaagcaatcatcagttcatccgagatgcgggagagttgtttgacatgagtcaaaacatccagccccaacagattcatggcctctttattcttttgataaacggagcctttgctgttcagcaccacaatgccggtttctacaaagtccatgatgagctcataatatttctctcgttgtgccgtttcctgttttacattgtacaaaatacgtgcgatgcggttcagcatgacattgaccatggaagaatcgccaggggaggcatgttcataaaaacgaacagcggggtcgtcgttttcgatggcgtcgagcagaaaggctatcttccgggtattaaaagtgtacaggcggtaaaaccagcctatggaaacaaggaatgaaggtacggctatgcatagccacagccaattgcgctgctggattagtaaggtgcaggcaatacctaggaacagtacagtgaaaaaacggaagaagaattgtttcacagcttgattatttattgtttcgttgatgcttctttagagtctgtttaaaatttgattgtagtgaggaaggacatgagaaaatggtcataatccgaattttttcatcttgttataaagcgtctgacgggtaattcccaactgtgccgctacagccgagaggtttccgttgcatttctctatcgctttctgaatcatttgcaattccatctcctccagagttgagacacttgtttctgtcgcaggggccgctatttttcggggaaaatgaaaatgttcctcactcaatataccatcttcattgataatgaccgctttctctacggcatgttccagttcgcgtatgtttccataccacggatatgtccgtaacttttcttgcgcaccggtagaaagaaggatatttcctttgtcatattgtttgcagaatcggtctataaagcgttcggccaaagggataatatcttctttgcgttcccgcagagggggaatctcgatgtggatggtattgatgcggtaaagcaaatcttcgcggaatttgcctttggccaccatctcttccaaatcacaattggtggcgcaaatcaaacgtatgttgacaggtatcggttcgttgcttcctactcgcaccacgctccggctctgaatggcggtgagtagtttggattgcaggtgatagggcaggttgcctatttcgtccagaaacaaagtcccttcatgggcggcttcgaatttacctgcacggtcggtatgggcatcggtaaacgagccttttttatggccgaacagttcgctttcgaacagggattcggtaatggcacccatatccaccgttatcatatcccgtcggtatcgggcagacaaagcgtgtatttcccgtgccagcatttcttttcctgtgccgttctctcctgtaatcagaatattggcatccgtttgcgccactttctctatcagcgtccgcagttgcttcatggcattgctttctccccaatacatagaagatacggttttagggacttccgctctcttcttgttcttggaggaattgcggcaggcagacagtaaggtttctatcagccgggcattgtcccaaggcttgacgatgaagtctgttgctccttccttgatgccgcgcactgccaggtctatgtcagcataggctgtgaaaagtactacgggcagggaggggtgtattttctttatctcgtgtaaccagtacagaccttcattcccggtattcagtccgctgctgaaattcatatccagcagcacaacttgcgcattttcttcacgtaacgcagcgggcagtgtgatgggtgagggcaatgtgacgatatgttcgaaatgatttttcagcaatagctttactgccgacagcactcctttgttatcatctactactatgatggttccttgtttgctcataaatatcttctgttctttttcagaagaacaaagataacaattttctctcctcaatcttttctttcagagaaaacttttcaagttcatgaattgttctattataaaatagcatttcaaatgaagacatttatattaagcataattgtaaccatgatcacatcggtagctggtgcacagcaaaaaagtttttatgactttacggtcaaggctattgacgggaaggacttgccactttccacgttcaaaggtaagaaagtattggtagtcaatgtggcatctaaatgcggtttcactccccagtacgccaagttggaggaattgtatgagaaatatggaaaagatgattttgtcgttatcggatttcctgccaataatttcctgcatcaggaacccggaacgaatgaagaaatcaaggagttttgtacgttgaattatggagtgacttttcctatgatggctaaaatatctgtaaaggggaaagatatagctcccctttatcaatggcttacgcataaaagtgaaaacggggtttcggatgctaagatagggtggaactttcataagtttctgattgatgaaaatggtagatgggttgcctcaatcggctctactaccagtccgctttcacaagaaattgtagaatggattgaagaataaaatgaccagaagataaataatgccatattgttattgcaccagctttccgtttttcagttccgacatcagctgacatttaaagaaacatcactaaaaatagcggaatatattttcgtcctatttattaaattgctatctttgccacgttttccacgccggtacttccgcaaggaagttagggaggtgggaaatatacatatatagaaaagacgtttacttgacgttttgttcttggctctacagaacttcgcaaattctaaaatccagccaaaacaaagcaacagtaggtgtctgcggggtatgtttatatccttggtgcgcctttgccggtcaaaggtgcattcaagtgtcattatacatatcggcgtgggcttctgcgttgctcgttcagactggattgggcaatgcgaaggccttgtagggcgggacgagtaacaggtacagattcccgcgctttttttatatataggtattacaaattctgatttaacacataagaaccgtccggttcgggaatctgcggaaggtcatcggttgacccgacaggctgcatctacatcgtgcggattcccatcctccatttgttgaaatagcttttctttggtcagcttaatcacaagaggccgattcctcttgtattttacgaaacttctcgtaattgattgaattgcagatgtatatctgtatttcaaagctccataactatgctttcaagtgaaaaaatgcaatggtttgccatgcgtgccacttatcgccgggggatgcagatcaaggctttgttggataaagaaggaatcaacaatttcattcccatgcgttacgaagttcgtataaggaacgggcgcaagaggcgtgagctggttcccgttatcagtgatctgatatttgttcatgccgtccagtccgaacttcagaaggtgaagtttaaacttccgtattttcaatatatgattgatatccgcaacgggcagaaaatcattgtgcccgatgatcagatgaggcagtttatcgctgtggctggaacgtatgacgagcatcttatttttttcagtcccgacgaggtgaacttacggcgcggtacgaaagtccgtatcacaggtggtgacttcgagggctacgagggggtgtttgtaaaggtaaaaggtgctagagaccgtcgtgtggttatcagtctgcaaggggtgatagctatggccatggcgactatttcgtcggacttaatagaagtgatagaagagccgaagaagaaataatttcatttgctacgttaaacattgttattccctgattaatgggaaagtaaacgatctgattatataaatcttatatataataatgtgtagaaccacatttatgccgtcaggcatccggctccagcagctgattcagaatcagcataaggaaatcttagccagggaaaagaataatgataaattcattcatctgtatgacattggtgcgtattgggcggcctttgagcgttccgcctgtaggttgagcggcttgttttctgaaaatgaactgactttgttttgtgtcccggattgtgtggaatatgtggtgatggcttccgttcctgccgatgaggcagagagctatttccgtgagtacatcattttgcacgatggaatttaccggaaagtgtggtcggagcattctttgctgatgggggattatcgtcactggcatgagacggctgtgaggtctgttttgttgtaaagaaaagtatgcggacttcgtggaccaagtaagtggtgttactttgcttgggaacatatcttactttgtttacgaagatatcttactttttttcaatggaatatggtcattcgtcatgctctatagggaataccctgaaaaatccttcaaaagcttcagcctgctcgcaaacgccctgttcatgggcattccggctgaaggattgggttcaggaatccttcagctgggggttggaatgtttcagccgaactgatcttcctccgattcttagggaatcgtttttctgaaggatattttccggctgaaacatttcgtgaggtatatccttcagccggaatgccgacaggcagggcgtttgcggagtagctgaaagatctgaaggaaaagtaaggcgtttcggcatgtagataccattatggaaaaaacaacaggtcaaatttttaaaagctcttgttcttccaatgaaaacatcttgttcttttttttaaagaccttgttcttttcggaaaagaacaggacgtttgaaaggttagtaacgtgtatgccggaaggttggtaacgtgtcaccccacacgttactaatgtgtggggtgtaagattagtaatgttacagatggaagattgcatatcttgctagtgatacaatcataaatgtatgaagttccagtatataaaagataaagttagtgcttatttcactaaggggaatgagcgtagtgttgcggtgaagaaaaacatcgccgtttcattagtgttgaaatgtataagtattttagtttccttgcaggtcgttccattgaccatcggttatgttaatcctacgaagtatggcatttggttgacgttgagttccattattgcctggctgtcttattttgatttggggtttgcccacggatttcgtaatcgttttgctgaggcaaaagcaaaaggggatatgaagttggcaaaagaatatgtcagtactacatacgcagtgctcttcttgctcttttccgtaattttattgataaccttggtagtgaataattatttggattggagtcgtattttaaatattgatcctgtttatgaggatgagctgagtctggttttcggtttgttggcatgcttcttttgcctgaacattgtggcaagtgtctttacgaccatgctgacggcagatcaaaagcctgctttagcttcgcttataagtacaagtggtcaggtactggcttttgcttgtgtttatgtattgactaaaaccacaaagggaagtctgagtgctttggctgtttctttttcagctataccgtgcctgtttcttttaattgtttctattattgtgtatcaaactaaaaaatacaagattgtagccccttcgttgcgtgacgttcgcttttcgttggtgcggagtgttgttggtttgggtggacagttttttgttgttatgttttctatgctttttatttttcaacttactaatatcattttgtcaagagtgcaaggcccagaagcagttacgcaatataatattgcttataagtattttaatgtacttaacatggctgcaaatattattttgactccgttttggtcagcatttactgatgcttatattaagagagattataattggatgcgtggtacgctagaaaaactggagaaattatggttgttatgtattcctattttagttttaatggtactgagttctgatctcttatataaattttggattggtgattctgtagctgtatctttttcattatcattttgtatggcaatatatgtattatgtcagacgggaggaaatatgtatatgtttcttattaatggaacgagcaaaatacgtttgcaactaatcatttatttgtcatttgctttggtttctattccgttgatgaagtattgttgtaagtattatggtatagaaggtatactgatagttcctactacggtatttattttgcaggcctttattggaagagtgcagatattgaagatgataaatggtacggctaaaggaatttggctgaagtgaaatgaaaaataatatgaattatcccctaatttctgtcataactgtttcttataatgcagttttaacaattgaacaaaccattctttccgtcattaaccaaacttatctgaatattgagtatatcatcattgacggtggaagtacggatggaacggttaatgtaataaaaaagtatgcggataaaatcgcttattgggtgagtgagccggataagggaatttatgatgcgatgaataaaggaattgcttattcgcatggagaatattgtaattttatcaatgcaggtgataaattttgttcctcatctatattgaaacaggtcatggactttaatcatgtggcagatataatagttggtcaggatttacatgttaatgaacataataaaatagtatcacgcagtgtattacctcgaagatataatcttctgcatttttatataactaccatacctcatcaaagttgctttataagggcctctttattaaaaaagtattattatgatacatctttaaaaatagtatcagactggaaattctatttacaatcaatcgttttaggtgggcatagtgtggctgcgtataacaatgttattgtgatatgtaatcccagaggagccagcagtgataacaaccggataaaagaagaacgcgaaaaagtgcttaaagatctactcccagcttatattgtcaatgattatcagtgtttatcctgattgggagaagaatttattgaaaacgctctttttttatttaataatcattggataagatttttagtaaaaaaggggcttgcaataatggttaaaatagtaagaatatttaaatagtttatttatgaaaatagtagtgttcaaaggaggactgggtaatcaactctttcaatatgcattttataaatacctttcaagaaaggatgaaaccttttatttctacaatgatgcttggtataatgtgagccataatggatttgaattagataaatattttaaaactgatgatttgaaaaaatgtagtaggttttggataattctgtttaaaaccattttatcaaaattataccattggaaaatatatgtagtaggttctgtagagtatcaatatcctaatcatttgtttcaagctggatattttttagacaaaaaatattatgacgaaaatactattgattttaaacatcttcttttgtcggaaaagaaccaatcattgctgaaggatattcaaaactcaaatagtgttggcgtgcatataagaagaggtgactacatgaccaaacaaaatttggttatatttggaaatatttgtacgcagaaatattatcatgatgccataagaataataacagagaaagtaaatgatgctgtcttctatgttttttctgatgatattagctgggtacaaactcatttggatatacccaatgctgtttatgtgaattggaatacaggagaatccagcatctatgacatgtatttgatgtcttcctgcaaatacaacattatagccaatagtacttttagttattgggcggcacgattaaataaaaaaactaatatggtgatttatccctcaaagtggtataatacatttactcctgatatttttcctgaatcatggtgtggaatctaaaaaatggatagatgataattactcagcttatttttctgctctttattattttttttataagatataaaaagaaggctgttctttatataataccattgtctttgttttttacaatgcttcctgttgtaagaatagggggtacgtatattggtctttgtgatgcgataaattttgttatatacgggtatattcttggtcggaaagatgcaaggaaagctatattctgcaatccattgtttttacctttgtttggtaattttatattgttgttattaattgctttgtatggaacggaacggacttcattgtatgtattgtggaaaacaatatcaaatgaaatacttttgccacttgcatttatctattttttgcgaacaaagaacgatattaaattaattgtaaatctttatttgaaagtgttttgggtgttatgtatatatggaattatagagtttctattaaattataatataattctatattggctgcaatctcagactgatttgtctttttgggtagatcataccaatgatatccgatatggatatgggcgatataattcattttttcattttcccataacatttggagatgcgtgcgttgtattcttttattttcttaccttcttctatagtaaatatgaaggagtatttatatcaaggaaatcttatattaagactttgtgtttgcttcttatcggtgttttccttgctaattcacgtgccactattcttgcattagtatttggattgttgcaatttgactatataagaaagcctaaaactctattaatcgctttttttatctttttaatcatggtcttgccgttttctgattatatattaaatgtatatcattccatatttgattttacgggtaattatgatgttggtggaagctctatggatatgagaatgagacaattagatatttctctttttctgtttttacaaaaccctatatttggtggtggcttgagtatgatttattatttaatgacagatatatcaatcccggaacttgcaggtgcggagtctcaattattttatttgttgattgaacgtggtttgttaggtatattgggatatctatggctgataatttcaatgtgcaaattattgccttcatatagaaagttcaacatggtttttgttggtatctgggtattggcttctttcgtatcattaacagtgggattatatataaattttccgattatatttttgctcattatatataagagtcagaaacttaatttattaaaaagataatgttctctattattattcctctatataacaaggctgattatattgcagaaacactgaagtcagttctgaatcaaacatattgtgattatgaagtaatcgtggtgaatgattcatcgacagataatagtttggaagtggcttctagttttcaggatgaacgaattcatatttatacaaaagaaaacgaaggtgtatcagcagcacgtaactatggtattatgcatgctaaatatgattatattgcttttctggatgcagatgatatttgggaatctgattatttggaatgccaaaagaagttgataggaacctatcctgatgctgggatttattctactgctttctactctttggaaaaggggaaacggaaacttcgtaatgtgttgattaacgaacacatacacttccttgttcatgattattttaaagaatccgtaatgaatggattatctatttgctggactagctccttgtgcttaaaaaaagaagtgataaaggagataccaatgtttcgagtaggtattaagcgtggtgaggatttggacctttggcttagaatagcgttgaattatgatgtagcctatttgaaccttccgaaagtcttttatagaacagggttatctgatagtcttacatcagattattctaaaaatggagaatttccttattatgagtggcttaactttacatcggaaagttcttattatagaaagtatgtgattttagctatgtatatacatgcaaaaaatgcatttatacatcatgattacgatacatgtttggccgagttgtggagtgttaaaactattgcttggagattcaaatgggcaaagcgattattattactagtaatttcatggataaaaagtaaataatgaatatcatttattttgttcccaatattaccattgcaggaggtatattccgtatagtgtcagataagatgaattatttggcggaaaatatggaagagcggctttttttggcgtattatggtaatggacaggagaaacctgtatatcctttgcatccgaacattcaactattacctattgatatagagtggaaagtaggctttggaaagaaaattaatagagtatggaaaaatataagcattatatgtcacatatttaaaaaatataagatagatattgctatcaatgccaatgctcctttattgatatggatattaccatttatttgtcggcggataaagaagatccatgagtttcatttttcttataaaggacaacagatattagatgaggaaatttttaaatcgcgaggaaagaaatttttagttcaatatttaagaaagtgttgtttgacaaaattcgataaggtaattgcattaacagagtctgacaagaaaatgtgggatttaccgaatatatttgtaatacctaattttagcaatatacaactacataaaaggaacggtagaaaaagcaaagttgctatatcagcaggtagattagaatctgtaaaaggttataatcgattgattgaagcttgggtgatagttgcacaaaagtgtccggactggcaattggaaatttggggtgaaggaagtctgcaagaaagtcttcaacaacaaattgatgctttgcatctttcatcagttgttcatctgaaaggtgtttcacatagtatagatgaagtatattctcattcttctttttttgtcatgtcatctttatacgaaggattcccgttggtattggtggaggcgatgaattgtggcttgccttgtgttagttttgatattactggagcaaatagtatcatagacaatggtaagaatggctttttagtgccggataatgatataaatgccttggcggaagcttgtataaaattgatagaaaataaagtattactagaagatatgggtaagcaggcttatatgtcgggaaaacgcttttcaaaaccaaaggtaatgcaaaaatggttagacctgtttagggaactgatgagagaataaaccgcatgattggaaagaaatataactacatacaaattagtttactattaatatgttagaaaagaaaattgcattgttgacttctgttacatttaataatattggtaacggatttatagatttgggtgctgaagctgctttgatgaaagcattaccgcttaatgctgaattatttaaagttagctcaaatgctaattttgcagctacaatgggacaaatgttcatgctgaaagaaaacccaataataaattggttatgggtacataccatgcaaagggctgctaaaaagcttcatgaccgttcatataaaacggtaaaaacgcaaaatatctttagtatggccagtatggttaaatgtgattattttataattccgggatgtgtattaactgttccattttttacgatttatggagatttaataaagagaaaagcagaacaaggaagtaagattatttttttaggtgcaagcggaaacttctatacagaatatgaagtcaaatttgtttctgaatatttaagaaaattgcagccttacgctataatgacccgtgatagccttgcctataaatactatgcaaattttacaaaaaatagctataatggaatagataatgtgttctttgtgaatttacttaatttaccccaaatagatactgatttaacaccgtatgtagtattgaatattgaagaacctaagcattataggataaaagaagaactgaaaaatatttttaaagaaaagaatattgtttattcttatcataagccttttccttatacaaaagttagtaagttagtaaaaagtggagtgatagtatctgataatccaatggattatttactcctttaccgtaatgcttcagaagtttattctgatagagtacatgcttgtatccctactttggcatttggaaataaagcaagattgtttagcaatagtcctaggatagccttgtttgaaaatgcgaaaattcctaatgtaagggaaagacttgtcagcatagaaggattaaaagaaatgcaggacaaacaaattgcatttctagcttcattattacagtaataaagagaatggtaatatgaatatattgtttttttatcgtgtttatcctaattatggtggtgttgaggtagtgacaactgtacttgccaatcgttttataaaggatgggcatggtgttatcatagcttcaatagaacagccgcatattgaactagcttgtcaattactaccagatgtaaagcttgtcaaattagactatcctgtttgttctataaaaaatatgagaaagttacatcgattaattataaatgaaaaaattgatattataattaatcagtggggacttccttttatgtcaacattactgtgtagaggggctataaaaagaacatcatgtaaattgatttcggtattacatggtgctccaaatacgtctaaattaattattaaggcgcgtgataaatgtgaaacagtttataacccttttttgaaatacatatatcatgctataatgtatctaaaagaagagttggtaaaagctagcattcgttataattgtagccattgtgaaaaatatgttcttctttcatctcattttatcaagccgttaagtgattatgcacatataaagagaactgagaatattatagcaataggcaatcctgttactattcctgtgtattttgaagaatgggagttaaaacagaagaagaagcagttgttatatgtaggaagaatggattatgaaaataaacgagtaaatagaatagtggaagcttggaaagttctttatgaaaaatatgttgattgggaacttgttttggtgggagaaggaccttataaaagtacattggaagaatatattagaagatatgatattcaacgtgtttgtttcaaaggctttcaagtatctcctcccatacaacattataaggaagcttctatatttttattgacttctgatttagaaggatttggattagtagttattgaaagtatgagttatggagtggtcccagttgtgtatggaagttatgaagctatatatgacatcatagacaatggaaagtccggcttaataactccgataccttataatagtcaaaaaacaattgactgcatcagcttactaattgagaatgaagaattaagaaaaaaaatggcaaaggaagccatgtacaaagcgaaatgttttacaattgattctgttattacaaggtggtacgatctgtttaaagaagtattataaacttccataaaaaataaattgtcatttgatttatgttccctctattacttagtaaaatcatacatacagataagttgctgtttttacatttggttactcagaaaactagaatttacacctttctcaaccccgtatcttacctcatagctttagaaaacaaatccctatttgaacaattcgatggtatttttgccgatggctctttactggtttctgccataagattagtatacggaaagcgagtgaccagacgtagttttgatatgacctcccttgctcccgaattgttgaattacctcatggaaagccgtaaaacgctctatatcgtagcctcgggtcaagaacaagtggagtgttctgtgaggatatttcaagagcagtatccgaagttacgcattgcagggttcaggaacggatatttctcttcggatgctgaaatgaataaggaagcttctcatatagtcgaattaaatccggattttctgatagtaggtatgggggccttgatgcaggaaaagtttctgcttaaggtaaaaaagatgggttaccaaggcatcggctttacgtgtggtggctttgttcaccaaacggcaatgaataggatgcactattatccggactgggttgataagatgaatttgcgtttcgtttatagaatgtataaggagaaacatacacgtacaagatatctgcaagctgcattcttgtttccggtacgctttatcggggaaagaattttcggatgaaagagcagactttgcttattgccatgtaaataatggagaatggcaacaacaggacgaagatagcagtaggaataatttttccgagtatttttaatacatctgttttcatgctgcaaatataaattaaaattcatagaatagtgaaattaagaactctaatatttctggggggactctttggaggaatgaatgttatcaaagggcaggctttttatggtactacaggactacttcatgcacctactgccgttatgcagaaagataaaaccgttatgctgggaggaaatatgctggatgtaaatatactttcccgatattgggtgagaagtgaatatcatccctatacctataactattatataaattgtactctgtttccttggctggaagtagcatatacttgtacgttggtaaaggggatacatggttcttcttattggcctcagcaaacttggggcaggtttaccaatcaggacagatcgtttcatttccggttgagggcatggaaagaaggctggtggaaggcttggacgcctcaggtagtgattggtgcgaatgatccgggaagccattcttcaaatggaggtggagacatagattgggggggcggtggtagcggaaaccacaattacttgacacgttattatctggcggcaacgaaacatgttgaatttagtggaataggtacagtgggggttcatgtagcttgggttatcggtaaagctatgagtgatgtgcattatagccgtcctgctgcaggggtaaactttcattttggcatgaagggcgaaggtttctggcagaaagctctgaatggatttaatctgatggtggaagtgtgtcccggacatgcggaagatctgcatacagcaacttatactgtgaatgtgggtggaacttattcaatatggaaagaccatatcaatcttattgctgaactgaatgacggtaaatattttagcggaggtatattctttaaattacatctcaaataactgacttgatttctagtggatgaagcattataagaatagccggaatcacttggaaagagtagttctggctattcttatataacgatatttgtatgtcctgtttttattatcctacaatgtatttagcattcttgccgcttattttacgaatgaataccacaagcagccacgatacgccaaatgccacgactgcggcagcgggaatttgtaaaggcacgggaacaccgatattgcgcatcaggactacacccggacctgtgaaaaaataatgtatcatatagatgccaaaaccacatacggtcaagtttgccagcatacgctggatcagttctgagcgtacttttactttcttggctatgaggaagaaagggatagtcatcataatcacattcaaagaattataggtgaagaacagttctaacatttcatcagtgcattgtggtaatgcggtcatgtggcggaaaccgaagaatgtgaccatgtaacctgccagaaacatggggatacagaccgacagtgtcttactccatgaccagtcgtggttgcgcagatagtgtcccaatagcaagtacccgttgaatccggcaaaataatagagcatattgaatgagttccacgcacagcctccccaaatgtatggggatacgaactgataataataaggtaacaaaccagttattccccatgcgacaagaaaccatagtttggctttctccgaggccttttctacccatgcggagaaaataggaaggtatagatataatccgataagcagatagatataccacatatgtacgtctaataaagagaaattgagaggtatttttgctatataacccaatgatacgttgagtgactgacgggcggcttcttcaccgctataagggaaaaagtcaagaattatttcgggattaagtcccagcaatcctgtaaaccaaggaaataaattataaatgacactccagataaggaacggccaaaatacacggctgattctttttttgtagaaagcggatatttcgccacgtacgggaagcagcaatgctcctgtaatcatgacaaacagtgggacacacggacggagaaaggctccgtaggcggctccccagaatttgatttcatcaatgttggctggcggttcgccggggtaaaagttgaacgggtctgcactatggcagcaaactacggtgaacatggctaccaaacgaacgacatccagccataccacatgttttcttgtggtgttcatagcaataggttgattcataatttaatttttgatttgacaggcataaaggtacgctttctctgaggattatttcttgctttggaacaaaaaataaaaagaactatccgcaatcatactacgaaatgagaatcctcccactgcaagaatcacaatcatttgtctttcgcagggggaggaattctattttgggttagagggttattttagtcctctgttcttcaacaagggatcaataccgggttctttgccgcggaaattgacatacatgtccatcgcatcgtcaatgcagccgggagtgaggatatatttgcggaacttaccggccacttcctgattgaaaatatcgcccgtttccttgtatgcctcgtatgcgtcacaatccagcacttccgcccaaatataactatagtaaccggcagtatatccaccacccatggtatggttgaaataagtggtgcggtagcgtgacggaatttgtttcagcaatccgcgcttacctaatgtttctgtttcgaactgcataacgtccatatcattgggaatttcttttaatacatgataatccatatccagcagggaagcagctaaatattcagccgtagcgaagccttgtccgtatttgccactcttgtccattttttcaaccagtccggcaggaataacttcacctgtctgataatgtttggcatatacattcaatacctccggttcaaaagcccaatgctcatctatctgtgacggcagttctacaaaatcacgcggaacactagccacaccataataatgtacatctttgaaaagattatgtaaagcatgtccgaattcgtggaacaaggtattcgcttcgtctgcactgagcaaagcgggttgtccggctgccggtttggtaaagttgcataccacggttactacaggagccactttcttgccgtccttgtaggtctgtgaacgatagcttccgcaccatgcgccacctttcttgctggcacgcggaaagaagtccatatagagtacacctagatgagaaccgtctttgtccttacattcgaatgcctgtgcatcgggatgagggaggggaagattgtccagctgggtgaaagtgataccgtatagtttgttggcaacatagaacacaccgttacgtacgttttccagtttcagataaggacgtacctgattttcatccaagtcgaatttggctttcttggcccggtctgcataataacgccagtcccaaccttcggctgtgaaggtttttccgtctttctttatttcggcattgatatctgccagttcttctttggctttggacagagtaggtgtccaaatctggtctaataatttatatacggcatccggtgttttcgccatacgttcttccagtgcaaaggaagcatagttttcatatcccatcagcttggctttttccagacgggctttgagcagtttgcgtaccacttccttgttgtcgtattcatttccgttatttcctctgttaatgtatcctttgaatatcttttcgcgcaggtctcggttatcggcatattgcaggaaaggcatgacgctgggattatgcagggtgaaaatccatttgccttccatgcctgcttctttagctgtttcggcagcactggcaatcaggttttggggtaatccggctaagtcttcttctttgtccacgatcaattggaaagcattggtttccttctgcatattttggccgaaggtgagctgcaacatggaaatctcactatttaattcacgcaattttttttgactttcggcatccaggttggcacctccacgtacaaaatctttataggtttcttccaacaacttcttttgctctttgtccaaattgccgggattttcatagacagttttgatacgtgcaaaaagtttttcatttaaggcgatgtcatcgctgtgttttgattgtagtggagagagttcacggctcagtgcatccatttcatcattggtattggcgcttttcagtccgtagaatacggtgctgactttacgaagtaacgttccgctttgatccagtgctgcaatggtattctggaaagtggcgggttcggggttgtttactatagcgtcaatctctttctgttgttcttccatgccctgcaaaaaggcgggtttgtaatgttccatcttgatttggtcgaaaggaggaacctggaagggagttgtgtactccgaaaggaatggatttccggtaggggctgcctgtttcccttgcgaaccgcaaccgcttaatatggcaaccgcacaggctgccaaaagaatgtgtttcataataatttgttttatataggtgataatgcaaagatagtaaaataaggcaaattccaataagtttgaagcgtagaactatttgtttgtttttatagtttgtctaattatcatacatcattgtctaataattagacagactgtttctttttgttcttttgcaatatgttgttaatcagttgtttgtttgcgtggcacggttttagcatttctattatagagaacgaattatagaaactttagtttcttatacactttatgggaagtaacgttgtgaaacgggacttctctttttcaaaataataatgattaaaaacacgaaatatgaaacagatttattatgtcattcaggctttgatacatggacgaagttctaatataataaaagtcgtctcgttaggcttgggcctgactatgagtattctgcttttctcaagagttgtgtatgagcagagttttgatacttgttttaaggatcatgataaattataccaattgtggaatatatggacagtaaatggggaacctcttcctcctagtgaatatattatcggtgcagctgccggaggcatactggatgcaatgccggaaattgtggaatcggcggcaagtgcggggatatggccggtatcatcacctgtttacaacggaagtgtccgttttgatgattttaaagttgctgctgattcattgttttttcagacaatgggtattgaggtcttgagtggtgatccggtacgcgaattgcagcaaaaagatgtaattttcctgagtaaagatttggcggataaaatgtttggcgatgagaacccgattggtaaaataattagtttcaataaggaaattgagttgacagtcaaaggaacgtatgctgctttacctgagaattgtactatgcgaccgaaggccgtcatttccttgccttctatctggagccgccggataggaaattattcatggaacggtggggacagctggaaagaatatatccggttgaagcaggatattgatttggatgaattgaacaagcgtattgatatggtagtacagcaacatattcccagaagtgataagtttggaatcactgtcatggcaaaacctgttcgggatacgtaccgtggatatgatgaagtgaaaagaatgcgtaatattatgcttattttaggtatatctattttgtttatcacgacattgaattatgtgttgatttctatttcttcattgagccggcgtgccaaaagtattggtgttcataaatgcagcggagcggggacgggtactgtttttggtatgtttatgtgggaaacaggtattattattttgctttcattgtttttgatggtttttttaatgtttaatttccgggagtttgtggaagatactacagctgctaaactggagtccctttttgcggtggaacgtatttgggtgcctttgggagtgactgctgtcttattcctcattggtggtgtgctgccgggacgaattttttcaaagataccggtcacacaggttttccggcgttatacagagggtaaaaaaggatggaaacgtccgttattgtttatccaatttgcaggagtggcttttatatgtggattgatgtgtgtagtgatgctccagtatcattatgttattaataaagatccgggttataatcctgagcgggtagtgattggtattaataatgcaccggatgctgaagctcggcttgctgcccgtcacttttatgaagggcttccatacgtggaagcattgacctcagcaactagctatccgtctaatggatatagcgggcagatgataccggatgagaaaggaacgagccttttttccagtcgctatgattttactcaggagaattatgtcgcttttatgggaatggccatacagcaagggcgtgtaccacgtgaatccggtgaggtggctgtcaatgaggaatttgtgcggagaatgcattggggaaaagatgttttaggtaagagtattcagacagaagaaggacgtgtcaaaatagtaggtgtgattaaagattttaatattgacggattctactcagagctgaaaccatttgttctgcaccatcatcccagagatttggctgatcttgtttatctccgtctgaaggaaccctttggtgagaatcttcagaaactgaaccgtgatgctgccgaagcttttccgaatcaaacagtcggttttgaaagcttggaacaaaaaatggcggatagttataattccgttcgtgtatttcgtaatgcgactttattggcggcaattgccatcttgtttattactttgatgggactgataggctatattaatgatgaattacagcgacgttcgaaagaaattgctattcgtaaagtgaatggagctgagtcatttgcgatattggaaatgttggtgcaagatgttctttggatttctttcccggctgtagtcgcaggtacattaggggcatggtatgtaggtggtttatggatggaacagtttgctgtgactgtaggttcgcttgttccttattatgtatgtgtagctattgtggtcttgatattgattgtcagttgtgtcatttccaaaacatggcgcattgccaatgagaatccagtaaagagtattaaatcagaataaggatcaatagaacaaacaattaaaatttattattatgatacagattgaaaatttaagtaaggtatttcgtacttcagaagtagaaacaattgcgttgaatcatgtaaacatagaggtgaaagaaggagagtttgtagctattatgggaccatcaggttgtggaaaatccacgttgttgaacattctcggattattggataatccttcggagggtagttataaactgataggaaaagaggtggccaatctaaaagagaaggaacgtacccgtttgcgcaagggtgtgataggtttcgtgttccagagttttaatctgatagacgaactgaatgtttttgaaaatgtggagttaccgttgacttatcttggaatcaaggccagtgagcgtaaggagcgtgttctggaaattttaaagcgaatgaacttgagtcatcgtgccaagcattttccgcaacagctttccggtggtcaacaacagcgtgtggctattgcccgtgctgtggttactaatcctaaattgatcctcgccgatgagcctactggtaatttggactcaaagaacggtgctgaagtaatgaatctattgaccgaacttaacaaggaggggactagtattgttatggtaactcactctcagcatgatgccggatttgctcatcgtgtcattcatttgtttgatggtagcgtagtggcgaacattaaagaataattaatgaaaggagggttgttatgaaacaaatctattatgcaatacaatcgatattacacggccgtggaagcaacgtgacgaaagtcatatcgctttcattaggtctgactattggtattctgcttttttcacaaatagcatttgaactcaattatgagaaatgttaccctgaggctgaccgattggtattggtacgtggagggggagagaatgtgaagactggagagaaaggagaaggatatgatgatagcttgtttgctccgatggcagaagcgttccgcagtgatttgtcacaatggattgaaaatgctacagtcattttcaattttgagacattaaatgtattcaaggatggtcataagctgaaagatgtaaattacgcttatgtagatacttgctatttccgtactttcggcatcaaagtattgaaaggaaatcctgaggaattacaaagggcggggagtatatttgtttctgaaacttttgttcgtgatgcttttggtgggcaggaccctgtgggacaaaaattgtccttggataaacagcatgaactgacagtccgtggtgtttatcaggatactccggaaaatactgcctatcattttgattttgtagctcccatttatgccggaggtggctatatagggggtggaacatggggacgtaatgacatttattatactattctccgtttgcgcgatggggtggacagagaagaaatcaatcgtcagatatacaaggctatgcaaaaatattatcctgattctgctgatgatgaatggagaagcttttatgatgcacagccattgcccgaaattcatctggatgactcaaatacccgcactcgcctttacatttatggttttttgggctttgctatattttttgtggcgatcatgaactatgtattagtagctattgctaccatgagccgcagagcaaaaagcataggtgtgcataagtgtagtggtgccagtgcaatcaacattttcagtatgttcctttttgagacagggattgtggtattaatttccgttatagtggccctctttattattttcaataccaaagatctgatagaagatttactttcggtgcagttatcttcactctttacattggaaactctatgggttccgatgctcattgtttttgtactgttcatggtagccggagtgttaccgggaagattgttttcacgcattcctgtcactcaagtttttcgtcgttacacagatgggaaaaaagggtggaagcgttctcttttatttgtacaatttatgggagtatcttttgtaatggggattttgttagtatctttgatgcagtatcatcatttgattaatagtgatatgggtatccgtactccaggattggtggaggcggagacatggatgtcacccgaagaagctgagaatatggttagcgatcttcgtcgtcaacccatggtggaaaatgccacccgttctatgcatggggttctgggagagtattggactcgtgggctgattgataatagtggcaagagaatagaaaccttgatgtataatccttgtgataaaaattatgctgaaaccatggggattactattattgaagggaaagatatgcagaatgagggggatgtattggtcaacgaagaagtagtgcggctgatgaaatggacagatggggcagtaggcaaacgattgaatgattttgataaagctggcaccattgttggtgtattccgtaatgtgcgcaatacgtcttttctctataagcagtttcccgtagctttagtttatagtcataatactagccacacttttgatgtacgtttaaggcagccatacgatgagagtttgaaaaaactgaacgaatacatggagcaggtgcattccactaaggcattggaatttattccgatagataccatgctgaaggaaatctatcgtaatgtataccgttttcgtaattctgtatggattacttctacttttattttgcttattgttgttatggggttgataggctatgtgaatgatgaaacacaacgtcgcagtaaggaaatagccatccgtaaggtgaatggtgccgaagcttcgactattctccggttgctgtcccgtgatatattgtatgttgctgttccatcggttttgataggaattgtagtatcgtactttacaggaaaggcttggttggatcaatttgccgaaacgatagacatgaatgcgttgtattttgtcggaacagcattggtgattatcgctctgatagtggtgtgtgtcgttgttagagcttggcgtatcgctaatgagaatccagtaaatagcattaagagtgagtagtatattgggaaaaaggagagcgggatgatatgtgttgggtgtcatcccgcttttttctttttacctgattcctgtgaaatttacattaataccatccaatgagccttttaagaagtttccggctagccatacattttcaaaatatgaaacgtcactgggaccgtaaaccatacggatgcatgtctgtgaactgttatcccatctccattcaaaattgtacctgtcttcggttacatagccgttccgatgttctattcgtatgatgtctgtgcctgttctattttcgtaaaagtctagtcgttgtgtgtagtattcaccgtcctgtacccaagtttcctgccaagttcggctacatagttcccgagtggttctgtaatatatttcgctgtaatcatcatcatcgtaccaacttcctatagatacttcacaggaggttaggctaaccattattatcagtacaactaccattccgaagtatttcagtatttttgttctcatatccgttaattttaaagtttgcttttcttatgtcacaaagataagtggagagaatgatacaataaacggaatattcctatttgtaaaggagaatttccctatttgtaataggaaaattcctatagtgaggagaggggaataagggtctgtcttatttcttttactattaaactgtaggttacaaaaagaggctgtccattggtgagacagccccgataatttccgaaaaatgataacaggatatttctatatattttttgattatccttgtttgggtattatctacgttttttcaacgaaaaaagtggtgcttcctgtacttgcttcattactctcaagagattacctccccaaatctttcttaaatcttcttccgtatatcctttttcaatcatttttatggtcagattaattaagtcattatctcctttacatccttgcagaccaccaccgccatcaaagtccgtacctattcctacatggtctatgccggctactttaatcatgtggtctaaatgttcgactgcatcacaaacggatgcggcttttggggttttattgatataggtatcgaggagacataactgtgccactccgccatttttcgctagtgcacggagttgttcgtctgttagattacggtcatggtcgcataaagtccttgacgaggaatgagaggcgatgataggttgtgtactatattttataacatcccagaaagtaccttcactggcatgtgatatatctatcataatacctaaccggttcatttccttcactacctcacgaccaaactgtgtcagtccttgagtagcatcttccgtatgagtggacgaatggcaaatatcgttatcgtaagaatggcagagagttatataattgactcccatctgtttgtatttttttatattcttgaggtccttgccgatggcgtaaccattctcgatccctataaagaaagctttcttgccttcattctttaaacgtaccaaatccttttccgtaagggcgatgccacaaaaatctttgtatttcgctacttcgtcataaatggattgaatcaacagggtggtgctttctacggctttttgtgaagatacgtcatctcgttttccctgccatataaatgcggctaggaactgtgcatccaatttaccttcctccattttttggatgctgaccatgttgtcttttctcaagcctacgctgtaaccgtttttaaaccaaagaggagtatctgtatgagtgtcaatggatagaatacggctatgaatttttttagctagatggaatgtatcagccttgttcactaggaatttaaataatttatgcatggtggtatctccggctgctgtaaatatttccggatgaaattgtacacctatcatttgtcgtatgggataagcttctatagcttccgctatactgtcgggcgcccaagccgtgattttgaatcccggtgctaatttccggatagcctgatgatggaatgtattgacttgcagcacttcttgtcctgtaatttctgccaacttgctttcctttatgatggatatcggatgggtgggggtagtgccggattcttcttggcgatggttgacacttgaggaatgttgtgtgggcagatcctgatataaagttccaccgaaagctacattcattaattgcagtcccctgcaaattcctaatatgggaatattccggtctgcggccatttttagcaccattaagtcgaaggtatcccgggcggggcttacttcttccagtttttcataaggaaggtcaccataatatattggttggatatcttctccacctgtaaagacaattccgtccagctgggatacaatttgacgcagtatctctacattatccgttacaggtatcatataaggaattcctccagagagaatgactgactgtacatatgccgtgtttacggctgtccgtttcggacttatatctgtagaaattccaatcaggggagacctttttattccgggaatcagttcggaatccactttttgattcaattggacgagtgcttcgggcaaaggattcttttgacttttttgtgcttgtacatggcaacatcccaaagctaatagtaatacaaagaggcatttgtttttcatatgagtatagattttgtcttgtagacaaatgtataaactatgtttttcttaaaaaaataaaatgccataaaaatagagtaggaggtacttgttctaagtatctcctacttttatattcagaaaataatcaatttatttcatatcttccacagccgcctgggcagcagcaagtctggcgataggtacgcggaatggagaacaagatacataattcaaaccaactttgtgacagaatttcactgatgaaggttcaccaccatgttcaccgcagataccgcatttcaaatcaggacgaactgaacgacctttatctacagccatttcaatcagctgacctacaccattttgatcgagtacttggaacgggtctactttcagaatcttcttttccagatataccggcaagaatgaagcgatatcgtcacgggaataaccgaaggtcatctgagtcaagtcattggtaccgaatgagaagtattctgcacggctggcaatgcggttggctgtcaatgcagcacgcggaatttcaatcatggtacctaccttgaacggaatttccataccttctttttcaaataatgctgctgctgcatcacggattaccttttcctgagcttcgaattcatacaggataccggtcaagggaaccataatttcgggatgcggatcatatccttctttcttcagttcaattgcagcacctagaatcgcttgagtctgcatctctgtgatttcgggataggtgttacccaaacgacagccgcggtggcctaacatcggattgtgttcacacagactttccacacgttttttgatttcctgtacagttacgcccattgctttagccatttcttcctgaccttttgcatcgtggggaacgaactcatgcaaaggaggatcgagcagacgaacattaaccggacatccatccatagccttaaagatgcctttgaagtcggctttctgataaggaagcaatttggctagagcttttctgcgtccttctacatccggtgataggatcatttcacgcatagcgacaatcttttcagcatcaaagaacatgtgttctgtacggcaaagaccgatacctgaagcaccaaaggcgcgagctacttccgcatcatgcggagtatcagcgttggtgcggacattcagcttggtgtatttgttgcaaagatccatcaatgcggcgaaatcgcctgaaacttcggctgctttggtttccactttacctttatatacttcaccggtagtaccgttcagagagatgaaatcaccttcttttaatgtaataccttcaatttctacggtacgtgtcttataatccacattgatagcaccagcaccggatacgcagcatttacccataccacgggccacaactgcagcgtgagaagtcatgccgccacgtgcggtcaggatgccttcggcgacagccatacctgccaagtcttccggagaagtctctatacgtaccattactactttcttaccatcggcggcccatttagctgcatcatcggcgaagaacacaatctgaccggtagcagcacccggagaagcgggcaaaccacgagtcaaaacttttgcttctttcaaagctttcttatcgaacacagggtggagaagttcgtctaatttattaggttcgcaacgctccaacgctgttttttcatcaatcattccctgacgcaacaagtccatggcgatttttaccatagctgctccggtacgtttaccgttgcgagtctgcaaaaaccataatttcccttcctgtacagtaaattccatatcctgcatatcgcgatagtggttttccaatttggtctgcagggcatccagttctttgtagatttccggcatggcttcttccatagagggatatttggctatgcgttcttcttcagaaataccggcacgttctgcccaacgctgagaaccgatttttgtgatttgttgcggggtacggataccggctacaacatcttcaccttgtgcgttgatcaaatattcgccattaaacaaatcctcaccgttaccagcgtcacgagagaagcaaacaccggtagctgaagtgtcacccatgttaccgaataccatggcttgtacacttacagcagtaccccattcggcaggaataccttccatcttgcggtaaagaatggcgcgttcgttcatccaactacggaatacagcacagatggcaccccaaagttgctcgtatgcacaggtcggaaaatcttgtccggtttgttcttttacagcgactttaaagcgtttaaccagttctttaaggtcttccacttctaattcgttgtctagcttcacacctttttcttcctttactttttcgatgatttcctcgaaagggtcgatgtcttccttatttaccggcttcatacccaatactacgtcaccatacatttgtacgaaacgacggtaagaatcccatgcgaaacgaggacgtccggtcttgcggctcaagccttccaccacttcgtcatttaaacctaaattaaggattgtatccatcattccaggcatggaagcacgagcacctgaacgtacggaaaccaataacggattttctatatcaccgaatttagagttcatcagactttcaatgttggcgatggctttctcaacatccgctttcagcagttctactactttatctctacctaactcataatattcgctacaaacttctgtggtgattgtaaatcccggaggtacgggaacaccgattagattcatttcagccaggttagcgccttttccaccaagcagatttctcatatctgcttttccttcagcttgtccattaccaaaggtgtaaactctttttttatccataataatgtatttaaagttaactcgctcaaaaaatgtaatcgcaaaactatacatattttatttatctccaaactatttactgaaaaaaattagcagaaattgtaatttctactttacaattttaatatctttcgatttatggggtatattcggggaaaatgcttaaatttgtccccaaattaacttattcggaaaagtggctagaaagaagaaagaacttccattattagagaaggtaacgataacagatgtagctgccgaaggaaaagctttggcgaaagtgaatgacttggtagtgtttgtgccttatgtagtacccggtgatgtggtagacttgcaggtaaaacgtaagaaaaatcattatgcagaagctgtggcagtgaaattccatgagtattctcctgtgcgtgcagtacccttctgtcagcattatggtgtatgtggtggttgtaagtggcagtgtctgccatacacagaacaaataaagtataagcaaaagcaggtgacggataacctgacccgtatcggcaagattgaattgccggaaatttcacctatcatggggtcggaaaaaacggaattttatcgcaacaaattggaatttacgttttctaacaaacgttggctgacagaggaagaggtaaaggaagatgtgaagtacgatcagatgaatgccgtaggtttccacattcccggtgcatttgacaaggtgctggctatagacaagtgctggttacaggatgatatcagcaaccagatacgcaatgcgattcgtgactatgcatacgaacacaattattctttctttaatctgcgttctcaagaaggaatgctccgcaacttgatgattcgtacctcaagtacgggtgagcttatggtgttgctgcaatgcaagattgtagaagagggtgaattggatttaatgaagcggttactgacttttgttgcagaacgttttccgcaaatcacttccttgttatatgtagtcaataataagtgtaatgataccattaacgatctggatgtgatggtgtttaaagggaatgaccatatttttgaggaaatggaaggcttgcgattcaagataggagcgaaatcattttatcaaactaattccggacaggcgtataatctttataaggtggcccgtaattttgccggattgactggtaatgagttggtgtatgatctttatacggggactggaaccatagccaacttcgtttcacgtcaggcaaagaaagtgattggtatcgaatatgtgcctgaagcgatagaagatgccaaagtgaattcggcaatcaatggcattgacaataccttattttatgccggtgacatgaaggatatcctgactcaagagttcatcagtcaacatggtcgtcctgatgttatcatcactgatcctccccgtgccggaatgcacgatgatgtgattaatacaatcctttttgctgagcctcagcggattgtgtatgttagctgtaatccagccactcaggcacgtgatttgtctttgttagatgccaaatacaaggtgatggccgtgcaacccgtagatatgttcccccatacacatcatgtggaaaatgtagtgttgctggaaaaaagaggataatccgaatggctcaattataaattgtttaaacagtaaatagaattatgtcaagaggtaaaaaaaatgattccggcagaccaaaggcgaaaagcgttgcccgatatactatatataatgtgacggagtccgctgagctgatggatttcctgatgcggaaaatggcgggaatcagtcgtagcaaggtaaaggcgttgcttgccaaccgtgtgattttggtagataatgtgattactactcaatataacttcgcgttgaaaccaggtatgaaagtgcagatgtctaaggcgaagaataaccgtgagtttaaacatccgatgctgaaactggtatacgaggatgcttatatcttggtggtggaaaagaaggaagggttgctttctgtcagcacagaacgtcagaaggaacgtactgcacaacatattttgaatgagtatgtaaagcgctcacatcgtttcaaccgcgtatttgtagtacatcgtctggaccgtgaaacttcgggattgatgatgtatgccaaggatgaaaaaacccagaatactttacgtgataattggcatgatattgtgacggaccgtcgttatgtgtccatcgtttctggtgatatggagaaggattacggtacagtagagtcttggttgaccgaccggaaattgtatgttagttccagttctgtggatgatggggaaggtaagtttgcggttactcattataaaacaataaagcgagccaatggatattctttggtggagttggatttggaaacaggacgtaagaatcagattcgtgtgcatatgtcggatttaggtcatcctgttattggtgaccggcgttatggcagtgagtgtgatcctttaggacgattggcgttacatgccttcaagttatgcttctatcatccggtaaccagagagttgatggagtttgaaactccttatcctacggcatttaaaggattaatgcagaaaaaataggaagcttcgtctgttaaaattaaataaaagacgtattcgcttttattttgagcagagattgagaataaaagtaagacaatatccatccgtctacattttggtaggtggatggatattgttgttttggatataataagatactatcatactgggataaaaaaatgataccgacttatcacaagccggtatcacgaaaaaataatcactttattattttgtaatcatccagctttgtgcgctcacaaagcacggggaataaaaagttatttatatactaacactgtaaacaactactttcacaagctattgtttacttacctaataaaaggtagcttaacaaatatcacttaatgttcattttttttgtttgaccttacaaaggtaacacaaaaattgagaattatactatatagttctaataacggataatattgcggtaatttaggcgctatttaagccatttatctaaccagttaaagaatgtgcgttgccataacactccattttgcggtttcaagacccaatgattctcatccggatataataaaagttcggccggaacaccgcgcaacacagccgcattgaatgccgacataccttgtgaagcgagaattctataatctttttcaccatgaatgcagagaataggagtgtcccatttgtcaacgaagcgatggggagagttggcaaaggtacgttgggctgttgcattgtttttgtcccaatatgcaccacccatatcccagttggcgaaccacatttcttctgtctccagatattgctgttccatattgaatataccatcgtgtgcaataaatgctttaaaacgtttgttatggtgtcccgccagccaatagacggagaatccgccgaagctggcacctacgcatcctaaacggtcggtatctacatatggttctttcgaaatatcatctatggcggataaatagtctttcatacattgacctccgtagtcaccgctaatttgttccaaccattccatgccgaatccgggcagaccgcgacgattcggagcgatgataatataatcgttggctgccataatctggaagttccagcggtagctccagaattggctaacgggactttgtggcccaccttcacagaataacaaagtaggatacttcttgtttgcgtcaaaattagtgggatagatcacccatgagagcatttgcttgccgtcagtagtcttggtccatctttcctctactttgcccaatttcagttgtttaaagatgtggtcattctcgtgtgagagttgtgccacttgtccgtcggcaggagtgagagtgtagatttcatcagcagcactgatagaatgacgtttggtaattattttgtcgcctgccatggctactgatccgtagtcatacatgccgtcagtcagtttttttatatcaccattcagattggtactgtataccatgctggttccatgccatacaccgataaaatacagactttgtgaatcattgttccagcagtagtcatctacgcccgattcgaaactttcggtgacaaatgtcttttggccgttattcaaattgtagacgcacaggcggtttcggtcgctttcgtaaccatcgcgctccatgctttgccatgcaatgtatttgccatcgggactgaatttcggattagtgtcatatcctctcatctcatctgttccattcgaatcttgtccattcagtttgcacaggttcagtgttgtgcctttttctatattatataggtatatatctgagtcggtagatactgcgtatgccaatccttgcttctttcggctggtgtaagctatttgtttagagtcgttgctccaagccagttgctcgatacctccgaaaggtttcattggagcttcaaacggttcaccttccatgatatcggtggctgctcccatcatgttaccattaaaatcagcgataaaaggatgcggaatactttctacccattcgtcccaatgtttatacatcaggtcgtttacaatgataccactggctttgggtaggtcagggtagaggtctacggtgcgttggccgtattttatttgtgagatgaaaagaatctttttgccgtccggtgaaaaagagaatccttctatgtctcctttgaaatcggaaataatacggcgttccgtaccgtcaggattcatctcccaaatctggctgccaccactttcattgcataagaatgcgatttttgttccgccttttatccattgaggttcgctttcattccaggctgtttgagtaagcagggtgttgttctttccatcggtattcattacgtaaattacatgatggcttttgttctcgggaacactataataggctacagtgtaggctatctttttgccgtcgggggaaatactcagactgcctatacgtcccattgcccacagggcttcgggggtgagacggccatctttgatggtgatttcttgcttacctataatgggttcgtagccctgtccttcctgctttacttcggtacaggaagaagctagcataagtgctgctgccatgatggttgcgcttgatttattcatatctaaaaattgtttttgatgattaattgactgcaaaaatacgtataaaagccggtgatgtgaaatgttcctgcatatttgttttgtttctttgtgtgcttgtggatggtatctttgctgagaggaataaatatagaagtagctatcgtattattacagaacagcgaagaccgctattctgtaataatacggcggccttcgctgtctttttaagggagtgtaaactcgttatttttttcctttattcattctttcttgttgcagacgctcctgctccttttgcaaagcctccagtttggccattagtccgccaccacctggtttgccgccattcttttggcttttcttttctttccgtgcttccagcatggcaaggagtttcttttcatcagttgttttgcgcagaatcaccatagtgaggataccaatcagtccggaaatgaagtaataataattcaaaccggaagaataaccgttgaagatgaaaataaacatgactggcatgatatacatcattagtttcatacccggcatttgctgttgtcccatatcctgctgtttcatggtgtacatggtattcagaatattagtgatactgaacagcaaacagaagaggcttaaatgattgcccagcaaaggaatgttggttccccagttgataatatcatcataagtggataagtccggggcccataagaaactttgttgacgcaactcaatagcgttaggcacgaagaagaataaagccatgaataccggcatttgtatcagcataggcaagcaacctcccatggggcttactccgtatttgctgtaaagtgccatcgtttcctgttgcttttttaaagcatcctctttcttgggatattttgcattaatctcgttgatatacggtttcaggacgcgcatcttggcagaagacatatatgatttgtaggtagccggataaactaacactttgacgataattgtcatcagcagcaatacgacacccatgctcagtccccaacccgagagccaatcaaacaaattaatagtgaaccagcggtttacccagcggataatgggccatcccaaataaaccagatcttctagttccaagtctttttgggaaaggcttagatcattgctgttcagcaaagtcttgaaatggttcggaccgaagtagaactgcatattggtagactgctttccggtaggatcaaagaaagttgtcatgtctgcggtatagttcttcatatatccgcttccttcctgttggggggtagaggttagggaggctttgtcaaaatcttgatcggcaataagtacgcttgagaagaactgatttttgaaagcaatccagtccaaacgatcagttacatcttcttttgcttctttcatttcgttcagataatctgaacttttttctactggcttgtaggtgagcgaggtatagcgctgctcgaagctgaaacctttttcaagttgacgtgcccgttgacgccagtttatattgacagtgttcagggcaggagggaagaaattctgcatgccatttgcgcgaattgtgaaattcaccatgtaagcatccggcaaaagtttgtaatcgaaatctatatagcctccattgtttgctgccagacgcatggttacagtgctgtctgttacgttggtaggctggaaatacatatcctcggtcaaaatgttttcattctttccttcgaaagcgaaattcatgcccgaatctttttcatcaaacagcatcaaaggcttgccgtcctgtccattatagtcttttaatatggctgcacatacccgtccacctttattggtgaaagtcagttttactacattattttccagtgtcgttagctgttccgcaccttggcttgcgccatagaacatagaggtagagtctaaatgcaatgttgcattctggctctgtgtcgtggcagcctgtgcctgtcgttcggcctctttttgggctatcgcctgaatggaatcctgataatgtttggcatgtgccatttcttcctggctaggacggttgtagatgctgaagcctatcacaactgcaccaatcagggcgaatcccactaaagtgtttttgtccatttttacttgtttaccttattatattataattctcgtttcttatttgtctattgccgctttgataaatgacaggaacaaaggatgtggtttcaatactgtactgctgtactcgggatggaactggactccgatgaaccattttaatgttggaatttcaattatttccactaaatcggattctggattggtacccacacatttcatacccgccttttcgtactcctgcttatagtcattgttgaattcgtagcggtgacggtggcgttcctgtatatgttcgcttttataggtttcgaaagtctttgagtgttggtcaaggatacattcataggcccctaggcgcatagtgccgcccatgttggtaatagctttctgttcttccataatgtctatcacgttgtgtggcgttttttcatccatttcacggctattggcatctgtataacctagcacgttacgggcaaactcaatagccatgcactgcatacctagacagataccaaaagtgggtacattgtgtgtacgtgcatatttaatagcgacgaacttaccttctatgccacgttgtccgaatcctggacagatgatgataccatccatttccttaatttgctcttctacattggcatctgtcagtttctcgctattgatgaagtggatatccgctttacggtcattgtaagtggctgcttgtgacaaagcttcaaggatagatttatatgcgtcttgtaaatcgtatttaccaactaatccaatttttacttttttagttgctttgtgacgacgatctagaaaatctctccatgggccgagggttggagtttcacccacgggcaatcccattttttgaaggatggttacatccagtccttgttcctgcatacgcaaaggtacttcataaatagtgggcatatcgatggactgcaccacagcattttcatctacgttacagaatagagcaactttctttttcaaattagtgctcaattcgtgctcggtacgcaataccaatatgtctggctgaatacctacggattgcaattcttttacagagtgttgggtaggtttggtcttcaattcgcctgctgccgccagataaggaacataagtaaggtgtacgcacaacgcattacgtcccatttcccatttcaattggcggatactttccaaataaggaagtgattcaatatcacctacagtaccaccaatttcggtaatgacaaaatcaaatttatatttgcttcccaataattttacattgcgtttgatctcgtcggtaatatgggggataacctgaatagtttttcccaaatagtcaccgcggcgttctttgtcaataacacttttgtaaatacgtcctgttgtaatgttattggctttagttgtctggatgcccaaaaaacgttcgtaatgtcccaaatcgaggtcggcttcgtgtccgtctaccgttacataacattcaccatgttcataaggattcaaagttcccggatcgatattgatgtacggatcgaacttttgaattgtcacattgtagcctctggcttgcagtaatttacctattgatgatgaaataatacctttacctaatgaggaggcaacaccaccagttacgaagatatacttagtttctcccactacttaatatttttaaatgttattttcttaattatcaatatcgcaatatttatcaaagttgcaaaattacaaaatctttttcaatatcgtcggatatgctttaaaaaatcatttgatgaaattgaatttatcattcgttattatataaaggaaacagttttttgggaaaaggaaaattaagtgtatttttgcacaaaactaaaaatagtatgagaaaaagtatatgtttgactatagtgcttgctgtattctgtatgggagaggcatcggcacagaaagtaaccaagacgaaagaagatccggctgtgaaagccttttctgattcattatcagctttgagcgcatcttattttgcttatttcagactgtgggatgatttgaatatcccggctccccggtgggtacgtcctaatccggctttttataagttgtttgttccgcccacttattatgaagctcctataaaagaaatttttgaaataaaatggagtccggatacgaaaataatgacggctgttgattcgctgtatatggggaaacgcgactctgtatctgctgctatatatcagctgcccgatttggaaaccttggccgctgcagaccgttggtcgaataatatattaaggaattattatttgcaatatccgggcagactggtgaataacgaactttatttggccgacctgaaaccactggaaaataatcagatagtaaaaagaccaaggaaagagaaaatcaaaagtttccttcaaccggaaacaccggtggaaagcttgactacggataatgaattgttggtggtacgtcctaacttttggacgcataaggggaatggatatgttcagttcacacaacattatatttcagataactggtataaaggtggtgaaagtactaatgcgctattgtccggcttggtgctggaagctaattttgatgaccgccagcgtatagagtttgaaaataagctggaaataaaattgggttttgttacagcaccgtcagatacagtgcataaatataagacgaatgccgacttgtttcgtttaaacagtaaactgggtgtgaaagcgttcaaaaactggtattatactttggcgggcgagttcaagacccagttttttgggaattataagacgaatacgaatgatatgatttctaattttctgtctcccgcccaattggatataaccctcggtatggactttaagcagaataagaagaattattcattgtctttgttaggatctccactggcgtatacttttatgtatatcagtaatgataagataactgatccgggtgcttttaatgtggatccggggcataaaacagcaaatcttttcggttcgaaatttacaggtaatctgacttggaaaattattcccagtattgtgtgggaatctaaattggagtactttacaacttatgacaccgtaattgccagttgggaaaatacattcaattttgtattgaaccgctatttgtctactaagttgtttgttcatgcgcgttatgatgacggtgtgacattgactgaggataacaagagttatttccagttgcaggaattgcttagttttggtttgaattatacttggtaaagaggagagtgtaagtgatattgatagaaaatcaataaaaacacggatgccgcagaataccaaatcctgcggcatccgtgtttttatctgagaatggttttctattttatttatgttcatccagcaacgtttgcacaattctttctgcagtgtgtccatcccagcgttccggtaaaagccccttttgccattctcctttattcagcatgtcaagggcgtttgctaagatttcagggtcttcccccactagccggtttgtgccgattgttactgtttcgggatgttctgcatacgtacttaatgtcatacaggggattcctaaaaaagtagcttcttccgctacgttacccgaatctgtaatgagaccctgggcatggctcactaaataaccgaatgacaaataaggttgcggtggtaatatatataacctttcagaagtaatatctaaaacagacagcttgttttttacatacgtgtggagcggtgccacgatcggcttgtctgttttttccagtatagtgcggaagatagctttcagtgcagtatcattgtttagcaatgaatgcttgttcaaggttagcaagaggtattctttttctttcagtcccataatagagaatgctaccgggcgctgtaagcgagtacggttataacgcagcgtatcaatcagaatgtttcctacaaaatgtacatgtgcttgttcggttcctgtttgattcagattgcggttggctaccattccggccgtgaatagataatcagacaagccatctgttatcatactgtttacttcttttggcatatccatatcgaaagaacgggttccggccactagatgagcaacttttatccccttctttttagccacgatagaacacgccatagtaggagttaggtcatccactacaagtactacctgtgcaggatgttgttccagttcgcgggcgaaagctaccaatatacctgccattcgctggaaaaaatctgtattatccacatgcagatacacatcgggacgcggcatatctaggtctgtaaacagagaaggttccaaacttttatcttcgtccgaacctgtgtagaccaggcgggcagtgatattttttcctgctgcctttgcagctttgatagcacgcattaatggggctattttcatgaaattgggacgtgcaccggcgataattgttactttcatcttattttaagctattttctgaacacaaaaatacattttcttatcgaatttattcgttactttgcagacaaataacaaccattatgctaacatttgttcaagttttagattttataggtacgtttgcctttgccatcagcggtatcagattggcgtctgccaaacagtttgactggtttggtgcgtatgtagtgggtttggcgacggctatcggaggaggtactatccgtgatgtgcttctagatgtgactccgggttggatgactgaccctatatatttaatatgtacaggacttgcattgttttgggtaattgctttcggcaagtatttgattcatatgcataacactttcttcctgttcgacagcatcggcctggcactatttacagtagtgggggtaggtaaaagtattgctctcggatatcctttttgggtagctataatcatgggtagtatcactggggccgcaggtggtgtgctccgcgatgtttttattaatgaaattccgcttatttttcgtaaagaaatttatgcaatggcctgtgtggtggggggattagcctattggatatgtgatctgtttggtctggaagcctttatttgccagataataggaggtagtactgtgtttttggcgcgtattttagctgttaaatatagcatctgtttaccaattttaaagggggaacaacgctaaacagcacctgaaaactattaaaatagggggtaaaaactgataaatgacggtttttaccccctattttaatagttttttctttgacacctatttaaaatgcgctatccttgcattaccgagagcatggaaaaagaatatgaacctaaactgaaagatttatgaatagcgttagttttaaaaagaacctgctgggtgtgcaagaagaattacttcggtttgcatacaaactcacagccgaccgtgaggaggctaatgacctgctacaagaaacttcattgaaagcgctggataatgaagacaagtatatccccgatacaaactttaagggatggatgtataccattatgcgtaacatctttataaacaattataggaaaatagtgcgtgaccagacatttgtggaccatacagacaatctctaccatttaagtatgcctcaggattccggctttgatagtaccgagggagcttatgacatgaaagaaatacatcgtatagtcggcttgcttcccaaagaataccgtattccattcgctatgcatgtgtcgggattcaaatatcgtgagattgccgaaaagttgggattgccgttgggtactgtaaaaagcagaatcttttttaccagacaacgcttgcaagggcaactccgtgattttgtataatccaaagggaaaaattatcaaaaaggtagagtgaaattcttttgctctgcctttttgtttttattggtttacaatatgatattaaacatgtttttggaagctaaaaaatagattcgaatattaactttatttttattcatttgttatatttgcaaaaggacaagacacctttaaatcaagtaataattatgaaaaaagaaatcaaattcagtttggtctaccgcgatatgtggcagtcatcagggaagtaccagcccagagctgatcagttagccaaaattgctcctctaatcgttgaaatggggtgttttgcccgagtggaaactaatggaggtgcttttgaacaagtgaacttactgtatggtgagaatcctaacaaggcagtgcgtacatttaccaaacctttacgtgaggcgggtattcagacgcatatgttggaccgcggtttaaatgcattgcgaatgtatcctgttccagctgatgtacgtcggttaatgtataaggtaaaacatgcgcaaggcgtggatattactcgtatattttgtggcttgaatgaagttcgtaatattattccttccataaaatatgctaaagaagcggggatgattcctcaagccactctttgcatcacttattctcctgtacatacggtggattattattcttatattgctgaccagttaatagaagcgggggcacccgaaatctgtttgaaagatatggcaggtatcggccgtcctgaaatgttagggcagttggtgagaaacatcaaagataaacatcctgaagtcattgtacaatatcatggacattccggtcccgggttatctatggcatctattttggaagtttgtgagaatggtgcggatatcattgatgtcgctatggagcccttatcatggggaaaagtgcatcctgacgtaatttctgtacaggctatgttgaaaaatgcaggttttcaggtacctgaaatcaatatgaaggcttatatgaaagcacgtagcatgacgcaggagtttattgatgattttttggggtattttattgattctaccaataagcacatgtcttccttgctgttaggttgtggacttcccggtggtatgatgggatctatgatggccgatttgaaaggtgtacattcaggtataaatctacttttgaaaggacagggaaaggaacctatgagtttggatgatttggtagtgatgctgtttgaagaagtggaatatgtatggccgaaattgggatatcctcctttagtaacaccgttcagccaatatgtgaagaatgtggctttgatgaatgtcatgcaattggtgaaaggagaggagagatggacgatgattgataaccatacatgggatatgattctgggaaaaagtggaaagttgccgggtgcgttggctcctgaaataattgaactggcgaaaagtaaaggttacgagtttactgacgaggatcctcagatgaactatcctgatgagctggacaagtaccgtaaggagatggatgataatggctgggaatatggtgaagatgaggaagagttgtttgaactggctatgcatgaccggcaataccgtgattataaatcgggtgtagccaagaaacgttttatggatgatttacaacgtgctcaggatgcggctatggtaaaaagtggctttgatgaggaaacaattcgaaaatataagcgtactaaggctgatcctattattgcgccggataagggacagattttatgggaagtttccgtggaaggtccttctatagcaccgtttgtcggacggaaataccagcatgatgaagtgttttgttatatttccactccgtggggagagtatgaaaagatctttactaattttacgggacgcattgtagaagtttgcgcccaacagggagctgtagttaataaaggtgatgttatagcttatttggaaagaacagagtttactgcatgatttgaaggtaaaatatagtttttttatccgctgtggcaggtttgaatttgtcatggcggatgtttttatcttttcattcttttaaaatttgcattcattcagttatgtgttatctttgttgccatgcagaaaaaacaggtagataagaaaaaatatatg
